(19) United States
(12) Patent Application Publication
(10) Pub. No.: US 2007/0184438 A1
(43) Pub. Date: Aug. 9, 2007

(54) Methods and nucleic acids for the analysis of colorectal cell proliferative disorders

(76) Inventors: Cathy Lofton-Day, Brier, WA (US); Andrew Sledziewski, Shoreline, WA (US); Jeff Thomas, Bellevue, WA (US); Robert W. Day, Seattle, WA (US); Lori Tonnes-Priddy, Everett, WA (US); Karen Cardon, Renton, WA (US)

Correspondence Address: DAVIS WRIGHT TREMAINE, LLP, 1201 Third Avenue, Suite 2200, SEATTLE, WA, 98101-3045, US

(21) Appl. No.: 10/562,377

(22) PCT Filed: Jun. 23, 2004
(86) PCT No.: PCT/US04/20356

§ 371 Date: Aug. 25, 2006

(30) Foreign Application Priority Data
Jun. 23, 2003 (US) 10/602,494

(51) Int. Cl. C12Q 1/68; C12M 3/00; C07H 21/04

(52) U.S. Cl. 435/6; 536/24.3; 435/287.2

(57) ABSTRACT

Various aspects of the present invention provide novel diagnostic and prognostic methods for detecting, or for detecting and differentiating between or among colorectal cell proliferative disorders. Preferably, said colorectal cell proliferative disorders are selected from the group consisting of colorectal carcinoma, colon adenomas, and colon polyps. The inventive methods are based on analysis of differential CpG dinucleotide methylation of genomic DNA between or among normal and disease states. Additional embodiments provide nucleic acids and oligomers (including oligonucleotides and peptide nucleic acid (PNA)-oligomers), nucleic acid arrays and kits useful for practicing said methods, and in otherwise detecting, or detecting and differentiating between or among colorectal cell proliferative disorders.

### CROSS-REFERENCE TO RELATED APPLICATION

[0001] This application claims the benefit of priority to U.S. patent application Ser. No. 10/602,494, filed 23 Jun., 2003 and entitled METHODS AND NUCLEIC ACIDS FOR THE ANALYSIS OF COLORECTAL CELL PROLIFERATIVE DISORDERS, which is incorporated herein by reference in its entirety.

### FIELD OF THE INVENTION

[0002] The present invention relates to genomic DNA sequences that exhibit altered CpG methylation patterns in disease states relative to normal. Particular embodiments provide methods, nucleic acids, nucleic acid arrays and kits useful for detecting, or for detecting and differentiating between or among colorectal cell proliferative disorders.

### SEQUENCE LISTING

[0003] A Sequence Listing, pursuant to 37 C.F.R. § 1.52(e)(5), has been provided on CRF (1 of 1) as a 0.736 KB file, entitled “Sequence Listing 47675-73.txt,” and which is incorporated by reference herein in its entirety.

### BACKGROUND

[0004] The etiology of pathogenic states is known to involve modified methylation patterns of individual genes or of the genome. 5-methylcytosine, in the context of CpG dinucleotide sequences, is the most frequent covalently modified base in the DNA of eukaryotic cells, and plays a role in the regulation of transcription, genetic imprinting, and tumorigenesis. The identification and quantification of 5-methylcytosine sites in a specific specimen, or between or among a plurality of specimens, is thus of considerable interest, not only in research, but particularly for the molecular diagnoses of various diseases.

[0005] Correlation of aberrant DNA methylation with cancer. Aberrant DNA methylation within CpG ‘islands’ is characterized by hyper- or hypomethylation of CpG dinucleotide sequences leading to abrogation or overexpression of a broad spectrum of genes, and is among the earliest and most common alterations found in, and correlated with human malignancies. Additionally, abnormal methylation has been shown to occur in CpG-rich regulatory elements in intronic and coding parts of genes for certain tumors. In colon cancer, for example, aberrant DNA methylation constitutes one of the most prominent alterations and inactivates many tumor suppressor genes such as p14ARF, p16INK4a, THBS1, MINT2, and MINT31 and DNA mismatch repair genes such as HMLH1.

[0006] In contrast to the specific hypermethylation of tumor suppressor genes, an overall hypomethylation of DNA can be observed in tumor cells. This decrease in global methylation can be detected early, far before the development of frank tumor formation. A correlation between hypomethylation and increased gene expression has been determined for many oncogenes.

[0007] Colorectal cancer. Colorectal cancer is the fourth leading cause of cancer mortality in men and women, although ranking third in frequency in men and second in women. The 5-year survival rate is 61% over all stages with early detection being a prerequisite for curative therapy of the disease. Up to 95% of all colorectal cancers are adenocarcinomas of varying differentiation grades.

[0008] Sporadic colon cancer develops in a multistep process starting with the pathologic transformation of normal colonic epithelium to an adenoma which consecutively progresses to invasive cancer. The progression rate of benign colonic adenomas depends strongly on their histologic appearance: whereas tubular-type adenomas tend to progress to malignant tumors very rarely, villous adenomas, particularly if larger than 2 cm in diameter, have a significant malignant potential.

[0009] During progression from benign proliferative lesions to malignant neoplasms several genetic and epigenetic alterations occur. Somatic mutation of the APC gene seems to be one of the earliest events in 75 to 80% of colorectal adenomas and carcinomas. Activation of K-RAS is thought to be a critical step in the progression towards a malignant phenotype. Consecutively, mutations in other oncogenes as well as alterations leading to inactivation of tumor suppressor genes accumulate.

[0010] In the molecular evolution of colorectal cancer, DNA methylation errors have been suggested to play two distinct roles. In normal colonic mucosa cells, methylation errors accumulate as a function of age or as time-dependent events predisposing these cells to neoplastic transformation. For example, hypermethylation of several loci could be shown to be already present in adenomas, particularly in the tubulovillous and villous subtype. At later stages, increased DNA methylation of CpG islands plays an important role in a subset of tumors affected by the so called CpG island methylator phenotype (CIMP). Most CIMP+ tumors, which constitute about 15% of all sporadic colorectal cancers, are characterized by microsatellite instability (MIN) due to hypermethylation of the hMLH1 promoter and other DNA mismatch repair genes. By contrast, CIMP-colon cancers evolve along a more classic genetic instability pathway (CIN), with a high rate of p53 mutations and chromosomal changes.

[0011] However, the molecular subtypes do not only show varying frequencies regarding molecular alterations. According to the presence of either micro satellite instability or chromosomal aberrations, colon cancer can be subclassified into two classes, which also exhibit significant clinical differences. Almost all MIN tumors originate in the proximal colon (ascending and transversum), whereas 70% of CIN tumors are located in the distal colon and rectum. This has been attributed to the varying prevalence of different carcinogens in different sections of the colon. Methylating carcinogens, which constitute the prevailing carcinogen in the proximal colon have been suggested to play a role in the pathogenesis of MIN cancers, whereas CIN tumors are thought to be more frequently caused by adduct-forming carcinogens, which occur more frequently in distal parts of the colon and rectum. Moreover, MIN tumors have a better prognosis than do tumors with a CIN phenotype and respond better to adjuvant chemotherapy.

[0012] Incidence and mortality rates for this disease increase greatly with age, particularly after the age of 60. Stage of disease at diagnosis also affects overall survival rates. Patients having lesions confined to the colonic wall have a high probability of surviving 5 or more years while patients with metastatic disease have a very low probability of survival. It is thought that most colorectal cancers develop over a course of 5-10 years from a precursor lesion called an adenomatous polyp. The potential of these lesions to result in adenocarcinoma has been shown to increase with both polyp size and degree of dysplasia. Because of the slow progression of this disease, early detection through routine screening can result in significant improvement of survival rates. Several randomized trials over the last 20 years have shown that screening test can reduce mortality over 30%, even though the tests used were not highly sensitive. The current guidelines for colorectal screening according to the American Cancer Society utilizes one of five different options for screening in average risk individuals 50 years of age or older. These options include 1 ) fecal occult blood test (FOBT) annually, 2 ) flexible sigmoidoscopy every five years, 3) annual FPBT plus flexible sigmoidoscopy every five years, 4) double contrast barium enema (DCBE) every five years or 5) colonoscopy every ten years. Even though these testing procedures are well accepted by the medical community, the implementation of widespread screening for colorectal cancer has not been realized. Patient compliance is a major factor for limited use due to the discomfort or inconvenience associated with the procedures. FOBT testing, although a non-invasive procedure, requires dietary and other restrictions 3-5 days prior to testing. Sensitivity levels for this test are also very low for colorectal adenocarcinoma with wide variability depending on the trial. Sensitivity measurements for detection of adenomas is even less since most adenomas do not bleed. In contrast, sensitivity for more invasive procedures such as sigmoidoscopy and colonoscopy are quite high because of direct visualization of the lumen of the colon. No randomized trials have evaluated the efficacy of these techniques, however, using data from case-control studies and data from the National Polyp Study (U.S.) it has been shown that removal of adenomatous polyps results in a 76-90% reduction in CRC incidence. Sigmoidoscopy has the limitation of only visualizing the left side of the colon leaving lesions in the right colon undetected. Both scoping procedures are expensive, require cathartic preparation and have increased risk of morbidity and mortality. Improved tests with increased sensitivity, specificity, ease of use and decreased costs are clearly needed before general widespread screening for colorectal cancer becomes routine.

[0013] Molecular disease markers offer several advantages over other types of markers, one advantage being that even samples of very small sizes and/or samples whose tissue architecture has not been maintained can be analyzed quite efficiently. Within the last decade a number of genes have been shown to be differentially expressed between normal and colon carcinomas. However, no single or combination of marker has been shown to be sufficient for the diagnosis of colon carcinomas. High-dimensional mRNA based approaches have recently been shown to be able to provide a better means to distinguish between different tumor types and benign and malignant lesions. However its application as a routine diagnostic tool in a clinical environment is impeded by the extreme instability of mRNA, the rapidly occurring expression changes following certain triggers (e.g., sample collection), and, most importantly, the large amount of mRNA needed for analysis (Lipshutz, R. J. et al., Nature Genetics 21:20-24, 1999; Bowtell, D. D. L. Nature genetics suppl. 21:25-32, 1999), which often cannot be obtained from a routine biopsy.

[0014] There is a need in the art for a sensitive diagnostic or prognostic assay for colon cell proliferative disorders that is based, at least in part, on detection of differential methylation of CpG dinucleotide sequences, and that has a diagnostic or prognostic accuracy of greater than about 80%, preferably greater than about 85% or about 90%, more preferably greater than about 95%, and most preferably greater than about 98%.

### SUMMARY OF THE INVENTION

[0015] The present invention provides novel methods and nucleic acids useful for detecting, or detecting and distinguishing between or among colorectal cell proliferative disorders, most preferably colorectal carcinoma, colon adenomas and colon polyps. The invention provides a method for the analysis of biological samples for features associated with the development of colon cell proliferative disorders, the method characterised in that at least one nucleic acid, or a fragment thereof, from the group consisting of SEQ ID NOS:1 to SEQ ID NO:195 is/are contacted with a reagent or series of reagents capable of distinguishing between methylated and non methylated CpG dinucleotides within the genomic sequence, or sequences of interest.

[0016] The present invention provides a method for ascertaining genetic and/or epigenetic parameters of genomic DNA. The method has utility for the improved diagnosis, treatment and monitoring of colon cell proliferative disorders, more specifically by enabling the improved identification of, and differentiation between or among subclasses of said disorders and the genetic predisposition to said disorders. The invention presents improvements over the art in that, inter alia, it enables an accurate and highly specific classification of colon cell proliferative disorders, thereby allowing for improved and informed treatment of patients.

[0017] Preferably, the source of the test sample is selected from the group consisting of cells or cell lines, histological slides, biopsies, paraffin-embedded tissue, bodily fluids, ejaculate, urine, blood, and combinations thereof. Preferably, the source is biopsies, bodily fluids, ejaculate, urine, or blood.

[0018] Specifically, the present invention provides a method for detecting colon cell proliferative disorders, comprising: obtaining a biological sample comprising genomic nucleic acid(s); contacting the nucleic acid(s), or a fragment thereof, with one reagent or a plurality of reagents sufficient for distinguishing between methylated and non methylated CpG dinucleotide sequences within a target sequence of the subject nucleic acid, wherein the target sequence comprises, or hybridizes under stringent conditions to, a sequence comprising at least 18 contiguous nucleotides of a sequence selected from the group consisting of SEQ ID NOS:1 to 195; and determining, based at least in part on said distinguishing, the methylation state of at least one target CpG dinucleotide sequence, or an average, or a value reflecting an average methylation state of a plurality of target CpG dinucleotide sequences. Preferably, the contiguous nucleotides comprise at least one CpG dinucleotide sequence. Preferably, distinguishing between methylated and non methylated CpG dinucleotide sequences within the target sequence comprises methylation state-dependent conversion or non-conversion of at least one such CpG dinucleotide sequence to the corresponding converted or non-converted dinucleotide sequence within a sequence selected from the group consisting of SEQ ID NOS: 40 to SEQ ID NO:195, and contiguous regions thereof corresponding to the target sequence.

[0019] Additional embodiments provide a method for the detection of colon cell proliferative disorders, comprising: obtaining a biological sample having subject genomic DNA; extracting, or otherwise isolating the genomic DNA; treating the extracted or otherwise isolated genomic DNA, or a fragment thereof, with one or more reagents to convert 5-position unmethylated cytosine bases to uracil or to another base that is detectably dissimilar to cytosine in terms of hybridization properties; contacting the treated genomic DNA, or the treated fragment thereof, with an amplification enzyme and at least two primers comprising, in each case a contiguous sequence at least 9 nucleotides in length that is complementary to, or hybridizes under moderately stringent or stringent conditions to a sequence selected from the group consisting SEQ ID NOS:40 to SEQ ID NO:195, and complements thereof, wherein the treated DNA or the fragment thereof is either amplified to produce an amplificate, or is not amplified; and determining, based on a presence or absence of, or on a property of said amplificate, the methylation state of at least one CpG dinucleotide sequence selected from the group consisting of SEQ ID NOS:1 to SEQ ID NO:9, or an average, or a value reflecting an average methylation state of a plurality of CpG dinucleotide sequences thereof. Preferably, at least one such hybridizing nucleic acid molecule or peptide nucleic acid molecule is bound to a solid phase. Further embodiments provide a method for the analysis of colon cell proliferative disorders, comprising: obtaining a biological sample having subject genomic DNA; extracting, or otherwise isolating the genomic DNA; contacting the extracted or otherwise isolated genomic DNA, or a fragment thereof, comprising one or more sequences selected from the group consisting of SEQ ID NOS:1 to SEQ ID NO:39 or a sequence that hybridizes under stringent conditions thereto, with one or more methylation-sensitive restriction enzymes, wherein the genomic DNA is either digested thereby to produce digestion fragments, or is not digested thereby; and determining, based on a presence or absence of, or on property of at least one such fragment, the methylation state of at least one CpG dinucleotide sequence of one or more sequences selected from the group consisting of SEQ ID NOS:1 to SEQ ID NO:39, or an average, or a value reflecting an average methylation state of a plurality of CpG dinucleotide sequences thereof Preferably, the digested or undigested genomic DNA is amplified prior to said determining.

[0020] Additional embodiments provide novel genomic and chemically modified nucleic acid sequences, as well as oligonucleotides and/or PNA-oligomers for analysis of cytosine methylation patterns within sequences from the group consisting of SEQ ID NOS:1 to SEQ ID NO:39.

### BRIEF DESCRIPTION OF THE DRAWINGS

[0021] The patent or application file contains at least one drawing executed in color. Copies of this patent or patent application publication with color drawings will be provided by the Office upon request and payment of the necessary fee.

[0022] FIG. 1 represents the sequencing data for a fragment of SEQ ID NO: 1 according to EXAMPLE 2 herein below. Each row of the matrix represents a single CpG dinucleotide site within the fragment and each column is an individual DNA sample (sample designations are listed on the X-axis). The vertical calibration bar on the left correlates the intensity of shading or color with the percent of methylation; with the degree of methylation represented by the darkness of each position within the column from black (or blue) representing 100% methylation to light grey(or yellow) representing 0% methylation. Colon cancer samples are to the left of the central vertical black line and healthy colon samples are to the right of the vertical black line.

[0023] FIG. 2 represents the sequencing data for a fragment of SEQ ID NO:2 according to EXAMPLE 2 herein below. Each row of the matrix represents a single CpG site within the fragment and each column is an individual DNA sample (sample designations are listed on the X-axis). The vertical calibration bar on the left correlates the intensity of shading or color with the percent of methylation; with the degree of methylation represented by the darkness of each position within the column from black (or blue) representing 100% methylation to light grey(or yellow) representing 0% methylation. Colon cancer samples are to the left of the central vertical black line and healthy colon samples are to the right of the central vertical black line.

[0024] FIG. 3 represents the sequencing data for a fragment of SEQ ID NO:3 according to EXAMPLE 2 herein below. Each row of the matrix represents a single CpG site within the fragment and each column is an individual DNA sample (sample designations are listed on the X-axis). The vertical calibration bar on the left correlates the intensity of shading or color with the percent of methylation; with the degree of methylation represented by the darkness of each position within the column from black (or blue) representing 100% methylation to light grey(or yellow) representing 0% methylation. Colon cancer samples are to the left of the left vertical black line, healthy colon samples are grouped between the left and right black lines, and peripheral blood lymphocytes (PBL) are grouped to the right of the right black vertical line.

### DETAILED DESCRIPTION OF THE INVENTION

Definitions:

[0025] The term “Observed/Expected Ratio” (“O/E Ratio”) refers to the frequency of CpG dinucleotides within a particular DNA sequence, and corresponds to the [number of CpG sites/(number of C bases×number of G bases)]×band length for each fragment.

[0026] The term “CpG island” refers to a contiguous region of genomic DNA that satisfies the criteria of (1) having a frequency of CpG dinucleotides corresponding to an “Observed/Expected Ratio” >0.6, and (2) having a “GC Content” >0.5. CpG islands are typically, but not always, between about 0.2 to about 1 kb, or to about 2 kb in length.

[0027] The term “methylation state” or “methylation status” refers to the presence or absence of 5-methylcytosine (“5-mCyt”) at one or a plurality of CpG dinucleotides within a DNA sequence. Methylation states at one or more particular palindromic CpG methylation sites (each having two CpG CpG dinucleotide sequences) within a DNA sequence include “unmethylated,” “fully-methylated” and “hemi-methylated.”

[0028] The term “hemi-methylation” or “hemimethylation” refers to the methylation state of a palindromic CpG methylation site, where only a single cytosine in one of the two CpG dinucleotide sequences of the palindromic CpG methylation site is methylated (e.g., 5′-CC^{M}GG-3′ (top strand): 3′-GGCC-5′ (bottom strand)).

[0029] The term “hypermethylation” refers to the average methylation state corresponding to an increased presence of 5-mCyt at one or a plurality of CpG dinucleotides within a DNA sequence of a test DNA sample, relative to the amount of 5-mCyt found at corresponding CpG dinucleotides within a normal control DNA sample.

[0030] The term “hypomethylation” refers to the average methylation state corresponding to a decreased presence of 5-mCyt at one or a plurality of CpG dinucleotides within a DNA sequence of a test DNA sample, relative to the amount of 5-mCyt found at corresponding CpG dinucleotides within a normal control DNA sample.

[0031] The term “microarray” refers broadly to both “DNA microarrays,” and ‘DNA chip(s),’ as recognized in the art, encompasses all art-recognized solid supports, and encompasses all methods for affixing nucleic acid molecules thereto or synthesis of nucleic acids thereon.

[0032] “Genetic parameters” are mutations and polymorphisms of genes and sequences further required for their regulation. To be designated as mutations are, in particular, insertions, deletions, point mutations, inversions and polymorphisms and, particularly preferred, SNPs (single nucleotide polymorphisms).

[0033] “pigenetic parameters” are, in particular, cytosine methylations. Further epigenetic parameters include, for example, the acetylation of histones which, however, cannot be directly analyzed using the described method but which, in turn, correlate with the DNA methylation.

[0034] The term “bisulfite reagent” refers to a reagent comprising bisulfite, disulfite, hydrogen sulfite or combinations thereof, useful as disclosed herein to distinguish between methylated and unmethylated CpG dinucleotide sequences.

[0035] The term “Methylation assay” refers to any assay for determining the methylation state of one or more CpG dinucleotide sequences within a sequence of DNA.

[0036] The term “MS.AP-PCR” (Methylation-Sensitive Arbitrarily-Primed Polymerase Chain Reaction) refers to the art-recognized technology that allows for a global scan of the genome using CG-rich primers to focus on the regions most likely to contain CpG dinucleotides, and described by Gonzalgo et al., Cancer Research 57:594-599, 1997.

[0037] The term “MethyLight™” refers to the art-recognized fluorescence-based real-time PCR technique described by Eads et al., Cancer Res. 59:2302-2306, 1999.

[0038] The term “HeavyMethyl™” assay, in the embodiment thereof implemented herein, refers to a HeavyMethyl™ MethylLight™ assay, which is a variation of the MethylLight™ assay, wherein the MethylLight™ assay is combined with methylation specific blocking probes covering CpG positions between the amplification primers.

[0039] The term “Ms-SNuPE” (lethylation-sensitive Single Nucleotide Primer Extension) refers to the art-recognized assay described by Gonzalgo & Jones, Nucleic Acids Res. 25:2529-2531, 1997.

[0040] The term “MSP” (Methylation-specific PCR) refers to the art-recognized methylation assay described by Herman et al. Proc. Natl. Acad. Sci. USA 93:9821-9826, 1996, and by U.S. Pat. No. 5,786,146.

[0041] The term “COBRA” (Combined Bisulfite Restriction Analysis) refers to the art-recognized methylation assay described by Xiong & Laird, Nucleic Acids Res. 25:2532-2534, 1997.

[0042] The term “MCA” (Methylated CpG Island Amplification) refers to the methylation assay described by Toyota et al., Cancer Res. 59:2307-12, 1999, and in WO 00/26401A1.

[0043] The term “hybridization” is to be understood as a bond of an oligonucleotide to a complementary sequence along the lines of the Watson-Crick base pairings in the sample DNA, forming a duplex structure.

[0044] “Stringent hybridization conditions,” as defined herein, involve hybridizing at 68° C. in 5×SSC/5× Denhardt's solution/1.0% SDS, and washing in 0.2× SSC/0.1% SDS at room temperature, or involve the art-recognized equivalent thereof (e.g., conditions in which a hybridization is carried out at 60° C. in 2.5×SSC buffer, followed by several washing steps at 37° C. in a low buffer concentration, and remains stable). Moderately stringent conditions, as defined herein, involve including washing in 3×SSC at 42° C., or the art-recognized equivalent thereof. The parameters of salt concentration and temperature can be varied to achieve the optimal level of identity between the probe and the target nucleic acid. Guidance regarding such conditions is available in the art, for example, by Sambrook et al., 1989, Molecular Cloning, A Laboratory Manual, Cold Spring Harbor Press, N.Y.; and Ausubel et al. (eds.), 1995, Current Protocols in Molecular Biology, (John Wiley & Sons, N.Y.) at Unit 2.10.

[0045] The terms “array SEQ ID NO,” “composite array SEQ ID NO,” or “composite array sequence” refer to a sequence, hypothetical or otherwise, consisting of a head-to-tail (5′ to 3′) linear composite of all individual contiguous sequences of a subject array (e.g., a head-to-tail composite of SEQ ID NOS:1-39, in that order).

[0046] The terms “array SEQ ID NO node,” “composite array SEQ ID NO node,” or “composite array sequence node” refer to a junction between any two individual contiguous sequences of the “array SEQ ID NO,” the “composite array SEQ ID NO,” or the “composite array sequence.”

[0047] In reference to composite array sequences, the phrase “contiguous nucleotides” refers to a contiguous sequence region of any individual contiguous sequence of the composite array, but does not include a region of the composite array sequence that includes a “node,” as defined herein above.

Overview:

[0048] The present invention provides for molecular genetic markers that have novel utility for the analysis of methylation patterns associated with the development of colon cell proliferative disorders. Said markers may be used for detecting, or for detecting and distinguishing between or among colon cell proliferative disorders.

[0049] Bisulfite modification of DNA is an art-recognized tool used to assess CpG methylation status. 5-methylcytosine is the most frequent covalent base modification in the DNA of eukaryotic cells. It plays a role, for example, in the regulation of the transcription, in genetic imprinting, and in tumorigenesis. Therefore, the identification of 5-methylcytosine as a component of genetic information is of considerable interest. However, 5-methylcytosine positions cannot be identified by sequencing, because 5-methylcytosine has the same base pairing behavior as cytosine. Moreover, the epigenetic information carried by 5-methylcytosine is completely lost during, e.g., PCR amplification.

[0050] The most frequently used method for analyzing DNA for the presence of 5-methylcytosine is based upon the specific reaction of bisulfite with cytosine whereby, upon subsequent alkaline hydrolysis, cytosine is converted to uracil which corresponds to thymine in its base pairing behavior. Significantly, however, 5-methylcytosine remains unmodified under these conditions. Consequently, the original DNA is converted in such a manner that methylcytosine, which originally could not be distinguished from cytosine by its hybridization behavior, can now be detected as the only remaining cytosine using standard, art-recognized molecular biological techniques, for example, by amplification and hybridization, or by sequencing. All of these techniques are based on differential base pairing properties, which can now be fully exploited.

[0051] The prior art, in terms of sensitivity, is defined by a method comprising enclosing the DNA to be analyzed in an agarose matrix, thereby preventing the difffusion and renaturation of the DNA (bisulfite only reacts with single-stranded DNA), and replacing all precipitation and purification steps with fast dialysis (Olek A, et al., A modified and improved method for bisulfite based cytosine methylation analysis, Nucleic Acids Res. 24:5064-6, 1996). It is thus possible to analyze individual cells for methylation status, illustrating the utility and sensitivity of the method. An overview of art-recognized methods for detecting 5-methylcytosine is provided by Rein, T., et al., Nucleic Acids Res., 26:2255, 1998.

[0052] The bisulfite technique, barring few exceptions (e.g., Zeschnigk M, et al., Eur J Hum Genet. 5:94-98, 1997), is currently only used in research. In all instances, short, specific fragments of a known gene are amplified subsequent to a bisulfite treatment, and either completely sequenced (Olek & Walter, Nat Genet. 1997 17:275-6, 1997), subjected to one or more primer extension reactions (Gonzalgo & Jones, Nucleic Acids Res., 25:2529-31, 1997; WO 95/00669; U.S. Pat. No. 6,251,594) to analyze individual cytosine positions, or treated by enzymatic digestion (Xiong & Laird, Nucleic Acids Res., 25:2532-4, 1997). Detection by hybridization has also been described in the art (Olek et al., WO 99/28498). Additionally, use of the bisulfite technique for methylation detection with respect to individual genes has been described (Grigg & Clark, Bioessays, 16:431-6, 1994; Zeschnigk M, et al., Hum Mol Genet., 6:387-95, 1997; Feil R, et al., Nucleic Acids Res., 22:695-, 1994; Martin V, et al., Gene, 157:261-4, 1995; WO 9746705 and WO 9515373).

[0053] The present invention provides for the use of the bisulfite technique for determination of the methylation status of CpG dinuclotide sequences within genomic sequences from the group consisting of SEQ ID NO:1 to SEQ ID NO:39. According to the present invention, determination of the methylation status of CpG dinuclotide sequences within sequences from the group consisting of SEQ ID NO:1 to SEQ ID NO:39 has diagnostic and prognostic utility.

[0054] Methylation Assay Procedures. Various methylation assay procedures are known in the art, and can be used in conjunction with the present invention. These assays allow for determination of the methylation state of one or a plurality of CpG dinucleotides (e.g., CpG islands) within a DNA sequence. Such assays involve, among other techniques, DNA sequencing of bisulfite-treated DNA, PCR (for sequence-specific amplification), Southern blot analysis, and use of methylation-sensitive restriction enzymes.

[0055] For example, genomic sequencing has been simplified for analysis of DNA methylation patterns and 5-methylcytosine distribution by using bisulfite treatment (Frommer et al., Proc. Natl. Acad. Sci. USA 89:1827-1831, 1992). Additionally, restriction enzyme digestion of PCR products amplified from bisulfite-converted DNA is used, e.g., the method described by Sadri & Hornsby (Nucl. Acids Res. 24:5058-5059, 1996), or COBRA (Combined Bisulfite Restriction Analysis) (Xiong & Laird, Nucleic Acids Res. 25:2532-2534, 1997).

[0056] COBRA. COBRA analysis is a quantitative methylation assay useful for determining DNA methylation levels at specific gene loci in small amounts of genomic DNA (Xiong & Laird, Nucleic Acids Res. 25:2532-2534, 1997). Briefly, restriction enzyme digestion is used to reveal methylation-dependent sequence differences in PCR products of sodium bisulfite-treated DNA. Methylation-dependent sequence differences are first introduced into the genomic DNA by standard bisulfite treatment according to the procedure described by Frommer et al. (Proc. Natl. Acad. Sci. USA 89:1827-1831, 1992). PCR amplification of the bisulfite converted DNA is then performed using primers specific for the interested CpG islands, followed by restriction endonuclease digestion, gel electrophoresis, and detection using specific, labeled hybridization probes. Methylation levels in the original DNA sample are represented by the relative amounts of digested and undigested PCR product in a linearly quantitative fashion across a wide spectrum of DNA methylation levels. In addition, this technique can be reliably applied to DNA obtained from microdissected paraffin-embedded tissue samples. Typical reagents (e.g., as might be found in a typical COBRA-based kit) for COBRA analysis may include, but are not limited to: PCR primers for specific gene (or methylation-altered DNA sequence or CpG island); restriction enzyme and appropriate buffer; gene-hybridization oligo; control hybridization oligo; kinase labeling kit for oligo probe; and radioactive nucleotides. Additionally, bisulfite conversion reagents may include: DNA denaturation buffer; sulfonation buffer; DNA recovery reagents or kits (e.g., precipitation, ultrafiltration, affinity column); desulfonation buffer; and DNA recovery components.

[0057] Preferably, assays such as “MethyLight™” (a fluorescence-based real-time PCR technique) (Eads et al., Cancer Res. 59:2302-2306, 1999), Ms-SNuPE (Methylation-sensitive Single Nucleotide Primer Extension) reactions (Gonzalgo & Jones, Nucleic Acids Res. 25:2529-2531, 1997), methylation-specific PCR (“ASP”; Herman et al., Proc. Natl. Acad. Sci. USA 93:9821-9826, 1996; U.S. Pat. No. 5,786,146), and methylated CpG island amplification (“MCA”; Toyota et al., Cancer Res. 59:2307-12, 1999) are used alone or in combination with other of these methods.

[0058] MethyLigh™. The MethyLigh™ assay is a high-throughput quantitative methylation assay that utilizes fluorescence-based real-time PCR (TaqMan®) technology that requires no further manipulations after the PCR step (Eads et al., Cancer Res. 59:2302-2306, 1999). Briefly, the MethyLight™ process begins with a mixed sample of genomic DNA that is converted, in a sodium bisulfite reaction, to a mixed pool of methylation-dependent sequence differences according to standard procedures (the bisulfite process converts unmethylated cytosine residues to uracil). Fluorescence-based PCR is then performed either in an “unbiased” (with primers that do not overlap known CpG methylation sites) PCR reaction, or in a “biased” (with PCR primers that overlap known CpG dinucleotides) reaction. Sequence discrimination can occur either at the level of the amplification process or at the level of the fluorescence detection process, or both.

[0059] The MethyLight™ assay may be used as a quantitative test for methylation patterns in the genomic DNA sample, wherein sequence discrimination occurs at the level of probe hybridization. In this quantitative version, the PCR reaction provides for unbiased amplification in the presence of a fluorescent probe that overlaps a particular putative methylation site. An unbiased control for the amount of input DNA is provided by a reaction in which neither the primers, nor the probe overlie any CpG dinucleotides. Alternatively, a qualitative test for genomic methylation is achieved by probing of the biased PCR pool with either control oligonucleotides that do not “cover” known methylation sites (a fluorescence-based version of the “MSP” technique), or with oligonucleotides covering potential methylation sites.

[0060] The MethyLight™ process can by used with a “TaqMang®” probe in the amplification process. For example, double-stranded genomic DNA is treated with sodium bisulfite and subjected to one of two sets of PCR reactions using TaqMan® probes; e.g., with either biased primers and TaqMan® probe, or unbiased primers and TaqMan® probe. The TaqMan® probe is dual-labeled with fluorescent “reporter” and “quencher” molecules, and is designed to be specific for a relatively high GC content region so that it melts out at about 10° C. higher temperature in the PCR cycle than the forward or reverse primers. This allows the TaqMan®) probe to remain fully hybridized during the PCR annealing/extension step. As the Taq polymerase enzymatically synthesizes a new strand during PCR, it will eventually reach the annealed TaqMan® probe. The Taq polymerase 5′ to 3′ endonuclease activity will then displace the TaqMan® probe by digesting it to release the fluorescent reporter molecule for quantitative detection of its now unquenched signal using a real-time fluorescent detection system.

[0061] Typical reagents (e.g., as might be found in a typical MethyLight™-based kit) for MethyLight™ analysis may include, but are not limited to: PCR primers for specific gene (or methylation-altered DNA sequence or CpG island); TaqMan® probes; optimized PCR buffers and deoxynucleotides; and Taq polymerase.

[0062] Ms-SNuPE. The Ms-SNuPE technique is a quantitative method for assessing methylation differences at specific CpG sites based on bisulfite treatment of DNA, followed by single-nucleotide primer extension (Gonzalgo & Jones, Nucleic Acids Res. 25:2529-2531, 1997). Briefly, genomic DNA is reacted with sodium bisulfite to convert unmethylated cytosine to uracil while leaving 5-methylcytosine unchanged. Amplification of the desired target sequence is then performed using PCR primers specific for bisulfite-converted DNA, and the resulting product is isolated and used as a template for methylation analysis at the CpG site(s) of interest. Small amounts of DNA can be analyzed (e.g., microdissected pathology sections), and it avoids utilization of restriction enzymes for determining the methylation status at CpG sites.

[0063] Typical reagents (e.g., as might be found in a typical Ms-SNuPE-based kit) for Ms-SNuPE analysis may include, but are not limited to: PCR primers for specific gene (or methylation-altered DNA sequence or CpG island); optimized PCR buffers and deoxynucleotides; gel extraction kit; positive control primers; Ms-SNuPE primers for specific gene; reaction buffer (for the Ms-SNuPE reaction); and radioactive nucleotides. Additionally, bisulfite conversion reagents may include: DNA denaturation buffer; sulfonation buffer; DNA recovery regents or kit (e.g., precipitation, ultrafiltration, affinity column); desulfonation buffer; and DNA recovery components.

[0064] MSP. MSP (methylation-specific PCR) allows for assessing the methylation status of virtually any group of CpG sites within a CpG island, independent of the use of methylation-sensitive restriction enzymes (Herman et al. Proc. Natl. Acad. Sci. USA 93:9821-9826, 1996; U.S. Pat. No. 5,786,146). Briefly, DNA is modified by sodium bisulfite converting all unmethylated, but not methylated cytosines to uracil, and subsequently amplified with primers specific for methylated versus unmethylated DNA. MSP requires only small quantities of DNA, is sensitive to 0.1% methylated alleles of a given CpG island locus, and can be performed on DNA extracted from paraffin-embedded samples. Typical reagents (e.g., as might be found in a typical MSP-based kit) for MSP analysis may include, but are not limited to: methylated and unmethylated PCR primers for specific gene (or methylation-altered DNA sequence or CpG island), optimized PCR buffers and deoxynucleotides, and specific probes.

[0065] MCA. The MCA technique is a method that can be used to screen for altered methylation patterns in genomic DNA, and to isolate specific sequences associated with these changes (Toyota et al., Cancer Res. 59:2307-12, 1999). Briefly, restriction enzymes with different sensitivities to cytosine methylation in their recognition sites are used to digest genomic DNAs from primary tumors, cell lines, and normal tissues prior to arbitrarily primed PCR amplification. Fragments that show differential methylation are cloned and sequenced after resolving the PCR products on high-resolution polyacrylamide gels. The cloned fragments are then used as probes for Southern analysis to confirm differential methylation of these regions. Typical reagents (e.g., as might be found in a typical MCA-based kit) for MCA analysis may include, but are not limited to: PCR primers for arbitrary priming Genomic DNA; PCR buffers and nucleotides, restriction enzymes and appropriate buffers; gene-hybridization oligos or probes; control hybridization oligos or probes.

[0066] Genomic Sequences According to SEQ ID NOS:1 to SEQ ID NO:39, and Treated Variants Thereof According to SEQ ID NOS:40 to SEQ ID NO:195. Were Determined to Have Utility for the Detection, Classification and/or Treatment of Colon Cell Proliferative Disorders.

[0067] The present invention is based upon the analysis of methylation levels within one or more genomic sequences taken from the group consisting SEQ ID NOS:1 to SEQ ID NO:39.

[0068] Particular embodiments of the present invention provide a novel application of the analysis of methylation levels and/or patterns within said sequences that enables a precise detection, characterisation and/or treatment of colon cell proliferative disorders. Early detection of colon cell proliferative disorders is directly linked with disease prognosis, and the disclosed method thereby enables the physician and patient to make better and more informed treatment decisions.

Further Improvements

[0069] The present invention provides novel uses for genomic sequences selected from the group consisting of SEQ ID NOS:1 to SEQ ID NO:39. Additional embodiments provide modified variants of SEQ ID NOS:1 to SEQ ID NO:39, as well as oligonucleotides and/or PNA-oligomers for analysis of cytosine methylation patterns within SEQ ID NOS:1 to SEQ ID NO:39.

[0070] An objective of the invention comprises analysis of the methylation state of one or more CpG dinucleotides within at least one of the genomic sequences selected from the group consisting of SEQ ID NOS:1 to SEQ ID NO:39 and sequences complementary thereto.

[0071] In a preferred embodiment of the method, the objective comprises analysis of a modified nucleic acid comprising a sequence of at least 18 contiguous nucleotide bases in length of a sequence selected from the group consisting of SEQ ID NOS:40 to SEQ ID NO:195, wherein said sequence comprises at least one CpG, TpA or CpA dinucleotide and sequences complementary thereto. The sequences of SEQ ID NOS:40 to SEQ ID NO:195 provide modified versions of the nucleic acid according to SEQ ID NOS:1 to SEQ ID NO:39, wherein the modification of each genomic sequence results in the synthesis of a nucleic acid having a sequence that is unique and distinct from said genomic sequence as follows:

[0072] For each sense strand genomic DNA, e.g., sense strand of SEQ ID NO:1, four converted versions are disclosed. A first version wherein “C”→“T,” but “CpG” remains “CpG” (i.e., corresponds to a case where, for the genomic sequence, all “C” residues of CpG dinucleotide sequences are methylated and are thus not converted); a second version discloses the complement of the disclosed genomic DNA sequence (i.e., antisense strand), wherein “C”→“T,” but “CpG” remains “CpG” (i.e., corresponds to a case where, for all “C” residues of CpG dinucleotide sequences are methylated and are thus not converted). The ‘upmethylated’ converted sequences of SEQ ID NOS:1 to SEQ ID NO:39 correspond to SEQ ID NO:40 to SEQ ID NO:117. A third chemically converted version of each genomic sequences is provided, wherein “C”→“T” for all “C” residues, including those of “CpG” dinucleotide sequences (i.e., corresponds to a case where, for the genomic sequences, all “C” residues of CpG dinucleotide sequences are unmethylated); and a final chemically converted version of each sequence, discloses the complement of the disclosed genomic DNA sequence (i.e., antisense strand), wherein “C”→“T” for all “C” residues, including those of “CpG” dinucleotide sequences (i.e., corresponds to a case where, for the complement (antisense strand) of each genomic sequence, all “C” residues of CpG dinucleotide sequences are unmethylated). The ‘downmethylated’ converted sequences of SEQ ID NO:1 to SEQ ID NO:39 correspond to SEQ ID NOS:118 to SEQ ID NO:195.

[0073] Significantly, heretofore, the nucleic acid sequences and molecules according to SEQ ID NO:1 to SEQ ID NO:195 were not implicated in or connected with the detection, classification or treatment of colon cell proliferative disorders.

[0074] In an alternative preferred embodiment, such analysis comprises the use of an oligonucleotide or oligomer for detecting the cytosine methylation state within genomic or pretreated (chemically modified) DNA, according to SEQ ID NOS:1 to SEQ ID NO:195. Said oligonucleotide or oligomer comprising a nucleic acid sequence having a length of at least nine (9) nucleotides which hybridizes, under moderately stringent or stringent conditions (as defined herein above), to a pretreated nucleic acid sequence according to SEQ ID NO:40 to SEQ ID NO:195 and/or sequences complementary thereto, or to a genomic sequence according to SEQ ID NOS:1 to SEQ ID NO:39 and/or sequences complementary thereto.

[0075] Thus, the present invention includes nucleic acid molecules, including oligomers (e.g., oligonucleotides and peptide nucleic acid (PNA) molecules (PNA-oligomers)) that hybridize under moderately stringent and/or stringent hybridization conditions to all or a portion of the sequences SEQ ID NOS:1 to SEQ ID NO:195, or to the complements thereof. The hybridizing portion of the hybridizing nucleic acids is typically at least 9, 15, 20, 25, 30 or 35 nucleotides in length. However, longer molecules have inventive utility, and are thus within the scope of the present invention.

[0076] Preferably, the hybridizing portion of the inventive hybridizing nucleic acids is at least 95%, or at least 98%, or 100% identical to the sequence, or to a portion thereof of SEQ ID NOS: 1 to SEQ ID NO: 195, or to the complements thereof.

[0077] Hybridizing nucleic acids of the type described herein can be used, for example, as a primer (e.g., a PCR primer), or a diagnostic and/or prognostic probe or primer. Preferably, hybridization of the oligonucleotide probe to a nucleic acid sample is performed under stringent conditions and the probe is 100% identical to the target sequence. Nucleic acid duplex or hybrid stability is expressed as the melting temperature or Tm, which i s the temperature at which a probe dissociates from a target DNA. This melting temperature is used to define the required stringency conditions.

[0078] For target sequences that are related and substantially identical to the corresponding sequence of SEQ ID NOS:1 to SEQ ID NO:39 (such as allelic variants and SNPs), rather than identical, it is useful to first establish the lowest temperature at which only homologous hybridization occurs with a particular concentration of salt (e.g., SSC or SSPE). Then, assuming that 1% mismatching results in a 1° C. decrease in the Tm, the temperature of the final wash in the hybridization reaction is reduced accordingly (for example, if sequences having >95% identity with the probe are sought, the final wash temperature is decreased by 5° C.). In practice, the change in Tm can be between 0.5° C. and 1.5° C. per 1% mismatch.

[0079] Examples of inventive oligonucleotides of length X (in nucleotides), as indicated by polynucleotide positions with reference to, e.g., SEQ D NO:1, include those corresponding to sets (sense and antisense sets) of consecutively overlapping oligonucleotides of length X, where the oligonucleotides within each consecutively overlapping set (corresponding to a given X value) are defined as the finite set of Z oligonucleotides from nucleotide positions:

[0080] n to (n+(X−1));

[0081] where n=1, 2, 3, . . . (Y−(X−1));

[0082] where Y equals the length (nucleotides or base pairs) of SEQ ID NO:1 (2,475);

[0083] where X equals the common length (in nucleotides) of each oligonucleotide in the set (e.g., X=20 for a set of consecutively overlapping 20-mers); and

[0084] where the number (Z) of consecutively overlapping oligomers of length X for a given SEQ ID NO of length Y is equal to Y−(X−1). For example Z=2,475−19=2,456 for either sense or antisense sets of SEQ ID NO:1, where X=20.

[0085] Preferably, the set is limited to those oligomers that comprise at least one CpG, TpG or CpA dinucleotide.

[0086] Examples of inventive 20-mer oligonucleotides include the following set of 2,261 oligomers (and the antisense set complementary thereto), indicated by polynucleotide positions with reference to SEQ ID NO:1:

[0087] 1-20, 2-21, 3-22, 4-23, 5-24 . . . 2,456-2,475.

[0088] Preferably, the set is limited to those oligomers that comprise at least one CpG, TpG or CpA dinucleotide.

[0089] Likewise, examples of inventive 25-mer oligonucleotides include the following set of 2,256 oligomers (and the antisense set complementary thereto), indicated by polynucleotide positions with reference to SEQ ID NO:1:

[0090] 1-25, 2-26, 3-27, 4-28, 5-29 . . . 2,450-2,475.

[0091] Preferably, the set is limited to those oligomers that comprise at least one CpG, TpG or CpA dinucleotide.

[0092] The present invention encompasses, for each of SEQ ID NO:1 to SEQ ID NO:195 (sense and antisense), multiple consecutively overlapping sets of oligonucleotides or modified oligonucleotides of length X, where, e.g., X=9, 10, 17, 20, 22, 23, 25, 27, 30 or 35 nucleotides.

[0093] The oligonucleotides or oligomers according to the present invention constitute effective tools useful to ascertain genetic and epigenetic parameters of the genomic sequence corresponding to SEQ ID NOS:1 to SEQ ID NO:39. Preferred sets of such oligonucleotides or modified oligonucleotides of length X are those consecutively overlapping sets of oligomers corresponding to SEQ ID NOS:1 to SEQ ID NO:195 (and to the complements thereof). Preferably, said oligomers comprise at least one CpG, TpG or CpA dinucleotide.

[0094] Particularly preferred oligonucleotides or oligomers according to the present invention are those in which the cytosine of the CpG dinucleotide (or of the corresponding converted TpG or CpA dinculeotide) sequences is within the middle third of the oligonucleotide; that is, where the oligonucleotide is, for example, 13 bases in length, the CpG, TpG or CpA dinucleotide is positioned within the fifth to ninth nucleotide from the 5′-end.

[0095] The oligonucleotides of the invention can also be modified by chemically linking the oligonucleotide to one or more moieties or conjugates to enhance the activity, stability or detection of the oligonucleotide. Such moieties or conjugates include chromophores, fluorophors, lipids such as cholesterol, cholic acid, thioether, aliphatic chains, phospholipids, polyamines, polyethylene glycol (PEG), palmityl moieties, and others as disclosed in, for example, U.S. Pat. Nos. 5,514,758, 5,565,552, 5,567,810, 5,574,142, 5,585,481, 5,587,371, 5,597,696 and 5,958,773. The probes may also exist in the form of a PNA (peptide nucleic acid) which has particularly preferred pairing properties. Thus, the oligonucleotide may include other appended groups such as peptides, and may include hybridization-triggered cleavage agents (Krol et al., BioTechniques 6:958-976, 1988) or intercalating agents (Zon, Pharm. Res. 5:539-549, 1988). To this end, the oligonucleotide may be conjugated to another molecule, e.g., a chromophore, fluorophor, peptide, hybridization-triggered cross-linking agent, transport agent, hybridization-triggered cleavage agent, etc.

[0096] The oligonucleotide may also comprise at least one art-recognized modified sugar and/or base moiety, or may comprise a modified backbone or non-natural internucleoside linkage.

[0097] The oligonucleotides or oligomers according to particular embodiments of the present invention are typically used in ‘sets,’ which contain at least one oligomer for analysis of each of the CpG dinucleotides of genomic sequence SEQ ID NOS:1 to SEQ ID NO:39 and sequences complementary thereto, or to the corresponding CpG, TpG or CpA dinucleotide within a sequence of the pretreated nucleic acids according to SEQ ID NOS:40 to SEQ ID NO:195 and sequences complementary thereto. However, it is anticipated that for economic or other factors it may be preferable to analyze a limited selection of the CpG dinucleotides within said sequences, and the content of the set of oligonucleotides is altered accordingly.

[0098] Therefore, in particular embodiments, the present invention provides a set of at least two (2) (oligonucleotides and/or PNA-oligomers) useful for detecting the cytosine methylation state in pretreated genomic DNA (SEQ ID NOS:40 to SEQ ID NO:195), or in genomic DNA (SEQ ID NOS:1 to SEQ ID NO:39 and sequences complementary thereto). These probes enable diagnosis, classification and/or therapy of genetic and epigenetic parameters of colon cell proliferative disorders. The set of oligomers may also be used for detecting single nucleotide polymorphisms (SNPs) in pretreated genomic DNA (SEQ ID NOS:40 to SEQ ID NO:195), or in genomic DNA (SEQ ID NOS:1 to SEQ ID NO:39 and sequences complementary thereto).

[0099] In preferred embodiments, at least one, and more preferably all members of a set of oligonucleotides is bound to a solid phase.

[0100] In further embodiments, the present invention provides a set of at least two (2) oligonucleotides that are used as ‘primer’ oligonucleotides for amplifying DNA sequences of one of SEQ ID NOS:1 to SEQ ID NO:195 and sequences complementary thereto, or segments thereof.

[0101] It is anticipated that the oligonucleotides may constitute all or part of an “array” or “DNA chip” (i.e., an arrangement of different oligonucleotides and/or PNA-oligomers bound to a solid phase). Such an array of different oligonucleotide- and/or PNA-oligomer sequences can be characterized, for example, in that it is arranged on the solid phase in the form of a rectangular or hexagonal lattice. The solid-phase surface may comprise, or be composed of silicon, glass, polystyrene, aluminum, steel, iron, copper, nickel, silver, gold, or combinations thereof. Nitrocellulose as well as plastics such as nylon, which can exist in the form of pellets or also as resin matrices, may also be used. An overview of the Prior Art in oligomer array manufacturing can be gathered from a special edition of Nature Genetics (Nature Genetics Supplement, Volume 21, January 1999, and from the literature cited therein). Fluorescently labeled probes are often used for the scanning of immobilized DNA arrays. The simple attachment of Cy3 and Cy5 dyes to the 5′-OH of the specific probe are particularly suitable for fluorescence labels. The detection of the fluorescence of the hybridized probes may be carried out, for example, via a confocal microscope. Cy3 and Cy5 dyes, besides many others, are commercially available.

[0102] It is also anticipated that the oligonucleotides, or particular sequences thereof, may constitute all or part of an “virtual array” wherein the oligonucleotides, or particular sequences thereof, are used, for example, as ‘specifiers’ as part of, or in combination with a diverse population of unique labeled probes to analyze a complex mixture of analytes. Such a method, for example is described in US 2003/0013091 (U.S. Ser. No. 09/898,743, published 16 Jan. 2003). In such methods, enough labels are generated so that each nucleic acid in the complex mixture (i.e., each analyte) can be uniquely bound by a unique label and thus detected (each label is directly counted, resulting in a digital read-out of each molecular species in the mixture).

[0103] The present invention further provides a method for ascertaining genetic and/or epigenetic parameters of the genomic sequences according to SEQ ID NOS:1 to SEQ ID NO:39 within a subject by analyzing cytosine methylation and single nucleotide polymorphisms. Said method comprising contacting a nucleic acid comprising one or more of SEQ ID NOS:1 to SEQ ID NO:39 in a biological sample obtained from said subject with at least one reagent or a series of reagents, wherein said reagent or series of reagents, distinguishes between methylated and non-methylated CpG dinucleotides within the target nucleic acid.

[0104] Preferably, said method comprises the following steps: In the first step, a sample of the tissue to be analysed is obtained. The source may be any suitable source, such as cell lines, histological slides, biopsies, tissue embedded in paraffin, bodily fluids, ejaculate, urine, blood and all possible combinations thereof. The DNA is then extracted or otherwise isolated from the sample. Extraction may be by means that are standard to one skilled in the art, including the use of commercially available kits, detergent lysates, sonification and vortexing with glass beads. Once the nucleic acids have been extracted, the genomic double stranded DNA is used in the analysis.

[0105] In the second step of the method, the genomic DNA sample is treated in such a manner that cytosine bases which are unmethylated at the 5′-position are converted to uracil, thymine, or another base which is dissimilar to cytosine in terms of hybridization behavior. This will be understood as ‘pretreatment’ or ‘treatment’ herein.

[0106] The above-described treatment of genomic DNA is preferably carried out with bisulfite (hydrogen sulfite, disulfite) and subsequent alkaline hydrolysis which results in a conversion of non-methylated cytosine nucleobases to uracil or to another base which is dissimilar to cytosine in terms of base pairing behavior.

[0107] In the third step of the method, fragments of the pretreated DNA are amplified, using sets of primer oligonucleotides according to the present invention, and an amplification enzyme. The amplification of several DNA segments can be carried out simultaneously in one and the same reaction vessel. Typically, the amplification is carried out using a polymerase chain reaction (PCR). The set of primer oligonucleotides includes at least two oligonucleotides whose sequences are each reverse complementary, identical, or hybridize under stringent or highly stringent conditions to an at least 18-base-pair long segment of the base sequences of one or more of SEQ ID NOS:40 to SEQ ID NO:195 and sequences complementary thereto.

[0108] In an alternate embodiment of the method, the methylation status of preselected CpG positions within the nucleic acid sequences comprising one or more of SEQ ID NOS:1 to SEQ ID NO:39 may be detected by use of methylation-specific primer oligonucleotides. This technique (MSP) has been described in U.S. Pat. No. 6,265,171 to Herman. The use of methylation status specific primers for the amplification of bisulfite treated DNA allows the differentiation between methylated and unmethylated nucleic acids. MSP primers pairs contain at least one primer which hybridizes to a bisulfite treated CpG dinucleotide. Therefore, the sequence of said primers comprises at least one CpG , TpG or CpA dinucleotide. MSP primers specific for non-methylated DNA contain a “T” at the 3′ position of the C position in the CpG. Preferably, therefore, the base sequence of said primers is required to comprise a sequence having a length of at least 9 nucleotides which hybridizes to a pretreated nucleic acid sequence according to one of SEQ ID NOS:40 to SEQ ID NO:195 and sequences complementary thereto, wherein the base sequence of said oligomers comprises at least one CpG, TpG or CpA dinucleotide.

[0109] The fragments obtained by means of the amplification can carry a directly or indirectly detectable label. Preferred are labels in the form of fluorescence labels, radionuclides, or detachable molecule fragments having a typical mass which can be detected in a mass spectrometer. Where said labels are mass labels, it is preferred that the labeled amplificates have a single positive or negative net charge, allowing for better detectability in the mass spectrometer. The detection may be carried out and visualized by means of, e.g., matrix assisted laser desorption/ionization mass spectrometry (MALDI) or using electron spray mass spectrometry (ESI).

[0110] Matrix Assisted Laser Desorption/Ionization Mass Spectrometry (MALDI-TOF) is a very efficient development for the analysis of biomolecules (Karas & Hillenkamp, Anal Chem., 60:2299-301, 1988). An analyte is embedded in a light-absorbing matrix. The matrix is evaporated by a short laser pulse thus transporting the analyte molecule into the vapour phase in an unfragmented manner. The analyte is ionized by collisions with matrix molecules. An applied voltage accelerates the ions into a field-free flight tube. Due to their different masses, the ions are accelerated at different rates. Smaller ions reach the detector sooner than bigger ones. MALDI-TOF spectrometry is well suited to the analysis of peptides and proteins. The analysis of nucleic acids is somewhat more difficult (Gut & Beck, Current Innovations and Future Trends, 1:147-57, 1995). The sensitivity with respect to nucleic acid analysis is approximately 100-times less than for peptides, and decreases disproportionally with increasing fragment size. Moreover, for nucleic acids having a multiply negatively charged backbone, the ionization process via the matrix is considerably less efficient. In MALDI-TOF spectrometry, the selection of the matrix plays an eminently important role. For desorption of peptides, several very efficient matrixes have been found which produce a very fine crystallisation. There are now several responsive matrixes for DNA, however, the difference in sensitivity between peptides and nucleic acids has not been reduced. This difference in sensitivity can be reduced, however, by chemically modifying the DNA in such a manner that it becomes more similar to a peptide. For example, phosphorothioate nucleic acids, in which the usual phosphates of the backbone are substituted with thiophosphates, can be converted into a charge-neutral DNA using simple alkylation chemistry (Gut & Beck, Nucleic Acids Res. 23: 1367-73, 1995). The coupling of a charge tag to this modified DNA results in an increase in MALDI-TOF sensitivity to the same level as that found for peptides. A further advantage of charge tagging is the increased stability of the analysis against impurities, which makes the detection of unmodified substrates considerably more difficult.

[0111] In the fourth step of the method, the amplificates obtained during the third step of the method are analysed in order to ascertain the methylation status of the CpG dinucleotides prior to the treatment.

[0112] In embodiments where the amplificates were obtained by means of MSP amplification, the presence or absence of an amplificate is in itself indicative of the methylation state of the CpG positions covered by the primer, according to the base sequences of said primer.

[0113] Amplificates obtained by means of both standard and methylation specific PCR may be further analyzed by means of hybridization-based methods such as, but not limited to, array technology and probe based technologies as well as by means of techniques such as sequencing and template directed extension.

[0114] In one embodiment of the method, the amplificates synthesised in step three are subsequently hybridized to an array or a set of oligonucleotides and/or PNA probes. In this context, the hybridization takes place in the following manner: the set of probes used during the hybridization is preferably composed of at least 2 oligonucleotides or PNA-oligomers; in the process, the amplificates serve as probes which hybridize to oligonucleotides previously bonded to a solid phase; the non-hybridized fragments are subsequently removed; said oligonucleotides contain at least one base sequence having a length of at least 9 nucleotides which is reverse complementary or identical to a segment of the base sequences specified in the present Sequence Listing; and the segment comprises at least one CpG, TpG or CpA dinucleotide.

[0115] In a preferred embodiment, said dinucleotide is present in the central third of the oligomer. For example, wherein the oligomer comprises one CpG dinucleotide, said dinucleotide is preferably the fifth to ninth nucleotide from the 5′-end of a 13-mer. One oligonucleotide exists for the analysis of each CpG dinucleotide within the sequence according to SEQ ID NOS:1 to SEQ ID NO:39, and the equivalent positions within SEQ ID NOS:40 to SEQ ID NO:195. Said oligonucleotides may also be present in the form of peptide nucleic acids. The non-hybridized amplificates are then removed.

[0116] In the final step of the method, the hybridized amplificates are detected. In this context, it is preferred that labels attached to the amplificates are identifiable at each position of the solid phase at which an oligonucleotide sequence is located.

[0117] In yet a further embodiment of the method, the genomic methylation status of the CpG positions may be ascertained by means of oligonucleotide probes that are hybridised to the bisulfite treated DNA concurrently with the PCR amplification primers (wherein said primers may either be methylation specific or standard).

[0118] A particularly preferred embodiment of this method is the use of fluorescence-based Real Time Quantitative PCR (Heid et al., Genome Res. 6:986-994, 1996; also see U.S. Pat. No. 6,331,393) employing a dual-labeled fluorescent oligonucleotide probe (TaqMan™ PCR, using an ABI Prism 7700 Sequence Detection System, Perkin Elmer Applied Biosystems, Foster City, Calif.). The TaqMan™ PCR reaction employs the use of a nonextendible interrogating oligonucleotide, called a TaqMan™ probe, which, in preferred imbodiments, is designed to hybridize to a GpC-rich sequence located between the forward and reverse amplification primers. The TaqMan™ probe further comprises a fluorescent “reporter moiety” and a “quencher moiety” covalently bound to linker moieties (e.g., phosphoramidites) attached to the nucleotides of the TaqMan™ oligonucleotide. For analysis of methylation within nucleic acids subsequent to bisulfite treatment, it is required that the probe be methylation specific, as described in U.S. Pat. No. 6,331,393, (hereby incorporated by reference in its entirety) also known as the MethylLight™ assay. Variations on the TaqMan™ detection methodology that are also suitable for use with the described invention include the use of dual-probe technology (Lightcycler™) or fluorescent amplification primers (Sunrise™ technology). Both these techniques may be adapted in a manner suitable for use with bisulfite treated DNA, and moreover for methylation analysis within CpG dinucleotides.

[0119] A further suitable method for the use of probe oligonucleotides for the assessment o f methylation by analysis of bisulfite treated nucleic acids comprises the use of blocker oligonucleotides. The use of such blocker oligonucleotides has been described by Yu et al., BioTechniques 23:714-720, 1997. Blocking probe oligonucleotides are hybridized to the bisulfite treated nucleic acid concurrently with the PCR primers. PCR amplification of the nucleic acid is terminated at the 5′ position of the blocking probe, such that amplification of a nucleic acid is suppressed where the complementary sequence to the blocking probe is present. The probes may be designed to hybridize to the bisulfite treated nucleic acid in a methylation status specific manner. For example, for detection of methylated nucleic acids within a population of unmethylated nucleic acids, suppression of the amplification of nucleic acids which are unmethylated at the position in question would be carried out by the use of blocking probes comprising a ‘CpG’ at the position in question, as opposed to a ‘CpA.’

[0120] For PCR methods using blocker oligonucleotides, efficient disruption of polymerase-mediated amplification requires that blocker oligonucleotides not be elongated by the polymerase. Preferably, this is achieved through the use of blockers that are 3′-deoxyoligonucleotides, or oligonucleotides derivitized at the 3′-position with other than a “free” hydroxyl group. For example, 3′-O-acetyl oligonucleotides are representative of a preferred class of blocker molecule.

[0121] Additionally, polymerase-mediated decomposition of the blocker oligonucleotides should be precluded. Preferably, such preclusion comprises either use of a polymerase lacking 5′-3′ exonuclease activity, or use of modified blocker oligonucleotides having, for example, thioate bridges at the 5′-terminii thereof that render the blocker molecule nuclease-resistant. Particular applications may not require such 5′ modifications of the blocker. For example, if the blocker- and primer-binding sites overlap, thereby precluding binding of the primer (e.g., with excess blocker), degradation of the blocker oligonucleotide will be substantially precluded. This is because the polymerase will not extend the primer toward, and through (in the 5′-3′ direction) the blocker—a process that normally results in degradation of the hybridized blocker oligonucleotide.

[0122] A particularly preferred blocker/PCR embodiment, for purposes of the present invention and as implemented herein, comprises the use of peptide nucleic acid (PNA) oligomers as blocking oligonucleotides. Such PNA blocker oligomers are ideally suited, because they are neither decomposed nor extended by the polymerase. In a further preferred embodiment of the method, the fifth step of the method comprises the use of template-directed oligonucleotide extension, such as MS-SNuPE as described by Gonzalgo & Jones, Nucleic Acids Res. 25:2529-2531, 1997.

[0123] In yet a further embodiment of the method, the fifth step of the method comprises sequencing and subsequent sequence analysis of the amplificate generated in the third step of the method (Sanger F., et al., Proc Natl Acad Sci USA 74:5463-5467, 1977).

[0124] Additional embodiments of the invention provide a method for the analysis of the methylation status of genomic DNA according to the invention (SEQ ID NOS:1 to SEQ ID NO:39, and complements thereof) without the need for pretreatment.

[0125] In the first step of such additional embodiments, the genomic DNA sample is isolated from tissue or cellular sources. Preferably, such sources include cell lines, histological slides, body fluids, or tissue embedded in paraffin. In the second step, the genomic DNA is extracted. Extraction may be by means that are standard to one skilled in the art, including but not limited to the use of detergent lysates, sonification and vortexing with glass beads. Once the nucleic acids have been extracted, the genomic double-stranded DNA is used in the analysis.

[0126] In a preferred embodiment, the DNA may be cleaved prior to the treatment, and this may be by any means standard in the state of the art, in particular with methylation-sensitive restriction endonucleases.

[0127] In the third step, the DNA is then digested with one or more methylation sensitive restriction enzymes. The digestion is carried out such that hydrolysis of the DNA at the restriction site is informative of the methylation status of a specific CpG dinucleotide.

[0128] In the fourth step, which is optional but a preferred embodiment, the restriction fragments are amplified. This is preferably carried out using a polymerase chain reaction, and said amplificates may carry suitable detectable labels as discussed above, namely fluorophore labels, radionuclides and mass labels.

[0129] In the fifth step the amplificates are detected. The detection may be by any means standard in the art, for example, but not limited to, gel electrophoresis analysis, hybridization analysis, incorporation of detectable tags within the PCR products, DNA array analysis, MALDI or ESI analysis.

[0130] In the final step the of the method the presence, absence or subclass of colon cell proliferative disorder is deduced based upon the methylation state of at least one CpG dinucleotide sequence of SEQ ID NOS:1 to SEQ ID NO:39, or an average, or a value reflecting an average methylation state of a plurality of CpG dinucleotide sequences of SEQ ID NOS:1 to SEQ ID NO:39.

Diagnostic and/or Prognostic Assays for Colon Cell Proliferative Disorders

[0131] The present invention enables diagnosis and/or prognosis of events which are disadvantageous to patients or individuals in which important genetic and/or epigenetic parameters within one or more of SEQ ID NOS:1 to SEQ ID NO:39 may be used as markers. Said parameters obtained by means of the present invention may be compared to another set of genetic and/or epigenetic parameters, the differences serving as the basis for a diagnosis and/or prognosis of events which are disadvantageous to patients or individuals.

[0132] Specifically, the present invention provides for diagnostic and/or prognostic cancer assays based on measurement of differential methylation of one or more CpG dinucleotide sequences of SEQ ID NOS:1 to SEQ ID NO:39, or of subregions thereof that comprise such a CpG dinucleotide sequence. Typically, such assays involve obtaining a tissue sample from a test tissue, performing an assay to measure the methylation status of at least one CpG dinucleotide sequence of SEQ ID NOS:1 to SEQ ID NO:39 derived from the tissue sample, relative to a control sample, or a known standard, and making a diagnosis or prognosis based, at least in part, thereon.

[0133] In particular preferred embodiments, inventive oligomers are used to assess the CpG dinucleotide methylation status, such as those based on SEQ ID NOS:1 to SEQ ID NO:195, or arrays thereof, as well as in kits based thereon and useful for the diagnosis and/or prognosis of colon cell proliferative disorders.

Kits

[0134] Moreover, an additional aspect of the present invention is a kit comprising, for example: a bisulfite-containing reagent; a set of primer oligonucleotides containing at least two oligonucleotides whose sequences in each case correspond, are complementary, or hybridize under stringent or highly stringent conditions to a 18-base long segment of the sequences SEQ ID NOS:1 to SEQ ID NO:195; oligonucleotides and/or PNA-oligomers; as well as instructions for carrying out and evaluating the described method. In a further preferred embodiment, said kit may further comprise standard reagents for performing a CpG position-specific methylation analysis, wherein said analysis comprises one or more of the following techniques: MS-SNuPE™, MSP, MethyLight™, HeavyMethyl™, COBRA™, and nucleic acid sequencing. However, a kit along the lines of the present invention can also contain only part of the aforementioned components.

[0135] While the present invention has been described with specificity in accordance with certain of its preferred embodiments, the following example serves only to illustrate the invention and is not intended to limit the invention within the principles and scope of the broadest interpretations and equivalent configurations thereof.

### EXAMPLES

[0136] Pooled genomic DNA from healthy colon, adenomas and colon adenocarcinoma tissue was isolated and analyzed using the discovery methods, AP-PCR and MCA (EXAMPLE 1). These technologies distinguish between methylated and unmethylated CpG sites through the use of methylation sensitive enzymes. In general, whole genomic DNA is first digested to increase manageability, and then further digested with a methylation sensitive enzyme. Methylated fragments are preferentially amplified because cleavage at the unmethylated sites prevents amplification of these products. Differentially methylated fragments identified using these techniques are sequenced (EXAMPLE 2) and compared to the human genome using the BLAST utility in the Ensemble database. The sample set was selected based on the initial aim of the diagnostic problem to be solved. The aim of the study was to enable the identification colon adenocarcinoma and adenomatous polyps in patients, particularly those 50 and older and most preferably by analysis of body fluids. Samples used in the EXAMPLE 1 experiments were divided into three age groups where group A=patients over the age of 65 years, group B=patients ages 50 to 65 and group C=patients younger than 50. Patient samples were also divided depending on the extent of disease. Stage 0 includes normal adjacent tissue (NAT) or no disease, Stage 1 includes adenomas, Stage 2 includes early carcinoma with no nodal involvement or metastasis (NOM0), and Stage 3 includes advanced disease with nodal involvement and/or metastasis (N1M1). DNA was extracted from snap-frozen patient tissue using Qiagen Genomic tip columns. Up to five DNA samples from each age and stage were pooled and compared as shown in TABLE 1. Multiple comparisons were performed for early and late stage adenocarcinoma for the patients over 65 years of age since this is the group with the highest incidence of colorectal cancer. A single comparison of samples from patients younger than 50 was included to look for overlap of these markers with the other age groups.

TABLE 1
Sample pools used in EXAMPLE 1

| Comparison | Pools |
|---|---|
| A1/A0 | 1 |
| A2/A0 | 3 |
| A3/A0 | 2 |
| B1/B0 | 1 |
| B2/B0 | 1 |
| B3/B0 | 1 |
| C1, 2, 3,/C0 | 1 |
| A1, 2, 3/A0 PBLs | 1 |
| B1, 2, 3/B0 PBLs | 1 |
| C1, 2, 3/C0 PBLs | 1 |

[0137] TABLE 2
SAMPLES USED ACCORDING TO EXAMPLE 1

| Pool | Tissue | Diagnosis | Age | Stage |
|---|---|---|---|---|
| Nat pool a1 | Colon | NAT | A | 0 |
| Nat pool a1 | Colon | NAT | A | 0 |
| Nat pool a1 | Colon | NAT | A | 0 |
| Nat pool a2 | Colon | NAT | A | 0 |
| Nat pool a2 | Colon | NAT | A | 0 |
| Nat pool a2 | Colon | NAT | A | 0 |
| Nat pool a2 | Colon | NAT | A | 0 |
| Nat pool a2 | Colon | NAT | A | 0 |
| Nat pool a2 | Colon | NAT | A | 0 |
| Nat pool a3 | Colon | NAT | A | 0 |
| Nat pool a3 | Colon | NAT | A | 0 |
| Nat pool a3 | Colon | NAT | A | 0 |
| Nat pool a3 | Colon | NAT | A | 0 |
| Nat pool a3 | Colon | NAT | A | 0 |
| Nat pool a3 | Colon | NAT | A | 0 |
| Pool a1 | Colon | Tubular adenoma | A | 1 |
| Pool a1 | Colon | Large tubulovillous adenoma | A | 1 |
| Pool a1 | Colon | Villous adenoma of ascending | A | 1 |
| | | colon | | |
| Pool a1 | Colon | Benign Tubulovillous adenoma | A | 1 |
| Pool a1 | Colon | Tubulovillous adenoma | A | 1 |
| Pool a2 | Colon | Infiltrating moderately | A | 2 |
| | | differentiated adenocarcinoma | | |
| | | T?N0M0 | | |
| Pool a2 | Colon | Adenocarcinoma well | A | 2 |
| | | differentiated, T3N0M0, Stage II | | |
| Pool a2 | Colon | Mucinous adenocarcinoma | A | 2 |
| | | T?N0M0 | | |
| Pool a2 | Colon | Invasive mod. Differ. Gr. 2/3 | A | 2 |
| | | adenocarcinoma T3N0M0, Stage II | | |
| Pool a2 | Colon | Adenocarcinoma, moderately | A | 2 |
| | | differentiated; cecum, N0T2 | | |
| Pool a2 | Colon | Invasive mod. Differ., Grade 2/3 | A | 2 |
| | | adenoca of sigmoid T2N0M0, | | |
| | | Stage II | | |
| Pool a3 | Colon | Mucinous adenocarcinoma | A | 3 |
| | | low % tumor, T4N1MX | | |
| Pool a3 | Colon | Adenocarcinoma, moderately | A | 3 |
| | | differentiated; mucinous, N1T3 | | |
| Pool a3 | Colon | Invasive mod differentiated | A | 3 |
| | | adenocarcinoma Grade 2, T2N1M0 | | |
| Pool a3 | Colon | Adenocarcinoma, moderately | A | 3 |
| | | differentiated, N2T3 | | |
| Pool a3 | Colon | Adenocarcinoma, moderately | A | 3 |
| | | differentiated, N1T2 | | |
| Pool a3 | Colon | Adenocarcinoma, well | A | 3 |
| | | differentiated, N1T3 | | |
| Pbl pool a | PBL | Normal | A | PBL |
| Pbl pool a | PBL | Normal | A | PBL |
| Pbl pool a | PBL | Normal | A | PBL |
| Pbl pool a | PBL | Normal | A | PBL |
| Nat pool b2 | Colon | NAT | B | 0 |
| Nat pool b2 | Colon | NAT | B | 0 |
| Nat pool b2 | Colon | NAT | B | 0 |
| Nat pool b2 | Colon | NAT | B | 0 |
| Nat pool b2 | Colon | NAT | B | 0 |
| Nat pool b1 | Colon | NAT | B | 0 |
| Pool b1 | Colon | Adenoma, tubulovillous, | B | 1 |
| | | benign dysplasia | | |
| Pool b2 | Colon | Well-differentiated | B | 2 |
| | | adenocarcinoma, T2N0M0 Stage I | | |
| Pool b2 | Colon | Adenocarcinoma, moderately | B | 2 |
| | | differentiated; sigmoid, N0M0T3; | | |
| | | stage II | | |
| Pool b2 | Colon | Adenocarcinoma, moderately | B | 2 |
| | | differentiated, N0M0T3; stage II | | |
| Pool b2 | Colon | Adenocarcinoma moderately | B | 2 |
| | | differentiated T3N0M0, Stage II | | |
| Pool b2 | Colon | Adenocarcinoma, well | B | 2 |
| | | differentiated, N0M0T3; stage II | | |
| Pbl pool b | PBL | Normal | B | PBL |
| Pbl pool b | PBL | Normal | B | PBL |
| Pbl pool b | PBL | Normal | B | PBL |
| Pbl pool b | PBL | Normal | B | PBL |
| Pbl pool b | PBL | Normal | B | PBL |
| Nat pool c2 | Colon | NAT | C | 0 |
| Nat pool c2 | Colon | NAT | C | 0 |
| Nat pool c2 | Colon | NAT | C | 0 |
| Nat pool c2 | Colon | NAT | C | 0 |
| Nat pool c2 | Colon | NAT | C | 0 |
| Nat pool c3 | Colon | NAT | C | 0 |
| Nat pool c3 | Colon | NAT | C | 0 |
| Nat pool c3 | Colon | NAT | C | 0 |
| Pool c2 | Colon | adenocarcinoma well | C | 2 |
| | | differentiated, T3N0M0, Stage II | | |
| Pool c2 | Colon | Well differentiated | C | 2 |
| | | adenocarcinoma T3N0M0 stage II | | |
| Pool c2 | Colon | adenocarcinoma well | C | 2 |
| | | differentiated, T3N0M0, Stage II | | |
| Pool c2 | Colon | Moderately differentiated | C | 2 |
| | | adenocarcinoma, T3N0M0, | | |
| | | Stage II | | |
| Pool c2 | Colon | Adenocarcinoma moderately | C | 2 |
| | | differentiated T3N0M0, Stage II | | |
| Pool c3 | Colon | Adenocarcinoma, stage III, well | C | 3 |
| | | differentiated, sigmoid, T3N1M0 | | |
| Pool c3 | Colon | Adenocarcinoma, mucinous, | C | 3 |
| | | N1M0T3; stage III | | |
| Pool c3 | Colon | Adenocarcinoma, mucinous, grade | C | 3 |
| | | 2, T3N1M0, stage III | | |
| Pbl pool c | PBL | Normal | C | PBL |
| Pbl pool c | PBL | Normal | C | PBL |
| Pbl pool c | PBL | Normal | C | PBL |
| Pbl pool c | PBL | Normal | C | PBL |
| Pbl pool c | PBL | Normal | C | PBL |

(NAT = normal adjacent tissue; PBL = Peripheral Blood Lymphocytes)

### Example 1

### Restriction Enzyme Analysis

[0138] Identifying one or more primary differentially methylated CpG dinucleotide sequences using a controlled assay suitable for identifying at least one differentially methylated CpG dinucleotide sequences within the entire genome, or a representative fraction thereof.

[0139] All processes were performed on both pooled and/or individual samples, and analysis was carried out using two different Discovery methods; namely, methylated CpG amplification (MCA), and arbitrarily-primed PCR (AP-PCR).

[0140] AP-PCR. AP-PCR analysis was performed on sample classes of genomic DNA as follows:

[0141] 1. DNA isolation; genomic DNA was isolated from sample classes using the commercially available Wizzard™ kit;

[0142] 2. Restriction enzyme digestion; each DNA sample was digested with 3 different sets of restriction enzymes for 16 hours at 37° C.: RsaI (recognition site: GTAC); RsaI (recognition site: GTAC) plus HpaII (recognition site: CCGG; sensitive to methylation); and RsaI (recognition site: GTAC ) plus MspI (recognition site: CCGG; insensitive to methylation);

[0143] 3. AP-PCR analysis; each of the restriction digested DNA samples was amplified with the primer sets (SEQ ID NOS:196-219) according to TABLE 1 at a 40° C. annealing temperature, and with [³²P]-dATP.

[0144] 4. Polyacrylamide Gel Electrophoresis; 1.6 μl of each AP-PCR sample was loaded on a 5% Polyacrylamide sequencing-size gel, and electrophoresed for 4 hours at 130 Watts, prior to transfer of the gel to chromatography paper, covering the transferred gel with saran wrap, and drying in a gel dryer for a period of about 1-hour;

[0145] 5. Autoradiographic Film Exposure; film was exposed to dried gels for 20 hours at −80° C., and then developed. Glogos was added to the dried gel and exposure was repeated with new film. The first autorad was retained for records, while the second was used for excising bands; and

[0146] 6. Bands corresponding to differential methylation were visually identified on the gel. Such bands were excised and the DNA therein was isolated and cloned using the Invitrogen TA Cloning Kit.

TABLE 3

Primers used According to the AP-PCR Protocol
Example 1

| | | |
|---|---|---|
| PRIMER | SEQUENCE (5′ to 3′) | SEQ ID NO: |

| | | |
|---|---|---|
| GC1 | GGGCCGCGGC | 196 |
| GC2 | CCCCGCGGGG | 197 |
| GC3 | CGCGGGGGCG | 198 |
| GC4 | GCGCGCCGCG | 199 |
| GC5 | GCGGGGCGGC | 200 |
| G1 | GCGCCGACGT | 201 |
| G2 | CGGGACGCGA | 202 |
| G3 | CCGCGATCGC | 203 |
| G4 | TGGCCGCCGA | 204 |
| G5 | TGCGACGCCG | 205 |
| G6 | ATCCCGCCCG | 206 |
| G7 | GCGCATGCGG | 207 |
| G8 | GCGACGTGCG | 208 |
| G9 | GCCGCGNGNG | 209 |
| G10 | GCCCGCGNNG | 210 |
| APBS1 | AGCGGCCGCG | 211 |
| APBS5 | CTCCCACGCG | 212 |
| APBS7 | GAGGTGCGCG | 213 |
| APBS10 | AGGGGACGCG | 214 |
| APBS11 | GAGAGGCGCG | 215 |
| APBS12 | GCCCCCGCGA | 216 |
| APBS13 | CGGGGCGCGA | 217 |
| APBS17 | GGGGACGCGA | 218 |
| APBS18 | ACCCCACCCG | 219 |

[0147] TABLE 4
A Selection of the Results of AP-PCR According to EXAMPLE 1

| | Primer | Primer | Primer | | Tissue | Methylation | Tissue | Methylation |
|---|---|---|---|---|---|---|---|---|
| Experiment | 1 | 2 | 3 | band | Type 1 | state 1 | Type 2 | state 2 |
| colon 4.1 | GC1 | G2 | APBS1 | 1 | colon nat | hypo | colon pool | hyper |
| | | | | | pool a1 | | a1 | |
| colon 4.1 | GC4 | G5 | APBS1 | 1 | colon nat | hypo | colon pool | hyper |
| | | | | | pool a1 | | a1 | |
| colon 4.2 | GC3 | G6 | APBS7 | 1 | colon nat | hypo | colon pool | hyper |
| | | | | | pool a1 | | a1 | |
| colon 4.2 | GC3 | G6 | APBS7 | 2 | colon nat | hypo | colon pool | hyper |
| | | | | | pool a1 | | a1 | |
| colon 4.2 | GC4 | G5 | APBS7 | 1 | colon nat | hypo | colon pool | hyper |
| | | | | | pool a1 | | a1 | |
| colon 4.2 | GC3 | G1 | APBS10 | 1 | colon nat | hypo | colon pool | hyper |
| | | | | | pool a1 | | a1 | |
| colon 4.2 | GC3 | G1 | APBS10 | 2 | colon nat | hypo | colon pool | hyper |
| | | | | | pool a1 | | a1 | |
| colon 4.2 | GC4 | G2 | APBS10 | 1 | colon nat | hyper | colon pool | hypo |
| | | | | | pool a1 | | a1 | |
| colon 4.5 | GC3 | G5 | APBS13 | 1 | colon nat | hypo | colon pool | hyper |
| | | | | | pool a1 | | a1 | |
| colon 4.5 | G3 | G4 | APBS17 | 1 | colon nat | hypo | colon pool | hyper |
| | | | | | pool a1 | | a1 | |
| colon 4.5 | G5 | G6 | APBSl7 | 1 | colon nat | hypo | colon pool | hyper |
| | | | | | pool a1 | | a1 | |
| colon 4.6 | G7 | G8 | APBS13 | 1 | colon nat | hypo | colon pool | hyper |
| | | | | | pool a1 | | a1 | |
| colon 4.6 | G8 | G10 | APBS13 | 1 | colon nat | hypo | colon pool | hyper |
| | | | | | pool a1 | | a1 | |
| colon 4.6 | G5 | G7 | APBS12 | 1 | colon nat | hypo | colon pool | hyper |
| | | | | | pool a1 | | a1 | |
| colon 4.7 | G2 | G4 | APBS12 | 1 | colon nat | hypo | colon pool | hyper |
| | | | | | pool a1 | | a1 | |
| colon 4.7 | G1 | G3 | APBS11 | 1 | colon nat | hypo | colon pool | hyper |
| | | | | | pool a1 | | a1 | |
| colon 4.7 | G1 | G3 | APBS11 | 2 | colon nat | hypo | colon pool | hyper |
| | | | | | pool a1 | | a1 | |
| colon 4.8 | G1 | G8 | APBS10 | 1 | colon nat | hypo | colon pool | hyper |
| | | | | | pool a1 | | a1 | |
| colon 4.8 | G5 | G9 | APBS7 | 1 | colon nat | hyper | colon pool | hypo |
| | | | | | pool a1 | | a1 | |
| colon 4.8 | G2 | G6 | APBS5 | 1 | colon nat | hypo | colon pool | hyper |
| | | | | | pool a1 | | a1 | |
| colon 4.8 | G1 | G5 | APBS5 | 1 | colon nat | hypo | colon pool | hyper |
| | | | | | pool a1 | | a1 | |
| colon 4.8 | G4 | G10 | APBS5 | 1 | colon nat | hypo | colon pool | hyper |
| | | | | | pool a1 | | a1 | |
| colon 4.9 | G1 | G7 | APBS1 | 1 | colon flat | hypo | colon pool | hyper |
| | | | | | pool a1 | | a1 | |
| colon 4.9 | APBS10 | APBS13 | APBS17 | 1 | colon nat | hypo | colon pool | hyper |
| | | | | | pool a1 | | a1 | |

[0148] MCA. MCA was used to identify hypermethylated sequences in one population of genomic DNA as compared to a second population by selectively eliminating sequences that do not contain the hypermethylated regions. This was accomplished, as described in detail herein above, by digestion of genomic DNA with a methylation-sensitive enzyme that cleaves un-methylated restriction sites to leave blunt ends, followed by cleavage with an isoschizomer that is methylation insensitive and leaves sticky ends. This is followed by ligation of adaptors, amplicon generation and subtractive hybridization of the tester population with the driver population.

[0149] In the initial restriction digestion reactions, 5 μg of each genomic DNA pool was digested with SmaI in a 100 μL reaction overnight at 25° C. in NEB buffer 4+BSA, and 100 units of enzyme (10 μL). The pools were then further digested with Xma I (2 μL=100 U), 6 hours at 37° C.

[0150] 500 ng of the cleaned-up, digested material was ligated to the adapter-primer RXMA24+RXMA12 (Sequence: RXMA24: AGCACTCTCCAGCCTCTCACCGAC (SEQ ID NO: 220); RXMA12: CCGGGTCGGTGA (SEQ ID NO:221). These were hybridized to create the adapter by heating together at 70° C. and slowly cooling to room temperature (RT) in a 30 μL reaction overnight at 16° C., with 400 U (1 μL) of T4 ligase enzyme.

[0151] 3 μL of the ligation mix for both tester and driver populations was used in each initial PCR to generate the starting amplicons. Two PCR reactions were run for the tester, and 8 for the driver. Reactions were 100 μL, with 1 μL of 100 μM primer RXMA24 (SEQ ID NO:220), 10 μL PCR buffer, 1.2 μL 25 mM dNTPs, 68.8 μl water, 1 μL titanium Taq, 2 μL DMSO, and 10 μL 5 M Betaine. PCR comprised an initial step at 95° C. for 1 minute, followed by 25 cycles at 95° C. for 1 minute, followed by 72° C. for 3 minutes, and a final extension at 72° C. for 10 minutes.

[0152] The tester amplicons were then digested with XmaI as described above, yielding overhanging ends, and the driver amplicons were digested with SmaI as above, yielding blunt end fragments.

[0153] A new set of adapter primers (hybridized as described for the above RXMA primers) JXMA24+JXMA12 (Sequence: JXMA24: ACCGACGTCGACTATCCATGAACC (SEQ ID NO:222); JXMA12: CCGGGGTTCATG (SEQ ID NO:223) was ligated to the Tester only (using the same conditions as described above for the RXMA primers).

[0154] Five μg of digested tester and 40 μg of digested driver amplicons were hybridized in a solution containing 4 μL EE (30 mM EPPS, 3 mM EDTA) and 1 μL of 5 M NaCl at 67° C. for 20 hours. A selective PCR reaction was done using primer JXMA24 (SEQ ID NO:222). The PCR amplification steps were as follows: an initial fill-in step at 72° C. for 5 minutes, followed by 95° C. for 1 minute, and 72° C. for 3 minutes, for 10 cycles. Subsequently, 10 μL of Mung Bean nuclease buffer plus 10 μL Mung Bean Nuclease (10 U) was added and incubated at 30° C. for 30 minutes. This reaction was cleaned up and used as a template for 25 more cycles of PCR using JXMA24 primer (SEQ ID NO:222) and the same conditions.

[0155] The resulting PCR product (tester) was digested again using XmaI, as described above, and a third adapter, NXMA24 (AGGCAACTGTGCTATCCGAGTGAC; SEQ ID NO:224)+NXMA12 (CCGGGTCACTCG; SEQ ID NO:225) was ligated. The tester (500 ng) was hybridized a second time to the original digested driver (40 μg) in 4 μL EE (30 mM EPPS, 3 mM EDTA) and 1 μL 5 M NaCl at 67° C. for 20 hours. Selective PCR was performed using NXMNLA24 primer (SEQ ID NO:224) as follows: an initial fill-in step at 72° C. for 5 minutes, followed by 95° C. for 1 minute, and 72° C. for 3 minutes, for 10 cycles. Subsequently, 10 μL of Mung Bean nuclease buffer plus 10 μL Mung Bean Nuclease (10 U) was added and incubated at 30° C. for 30 minutes. This reaction was cleaned up and used as a template for 25 more cycles of PCR using NXMA24 primer and the same conditions.

[0156] The resulting PCR product (1.8 Fg) was digested with XmaI (in 50 μL total volume, NEB buffer 4+BSA, and 2 μL=100 U XmaI, 6 hours at 37° C.) and ligated into the vector pBC Sk—predigested with Xmal and phosphatased (675 ng). Five (5) μL of a 30 μL ligation was used to transform chemically competent TOP10™ cells according to the manufacturer's instructions. The transformations were plated onto LB/XGal/IPTG/CAM plates. Selected insert colonies were sequenced according to Example 2.

[0157] Scoring of unique sequence embodiments comprising one or more differentially methylated CpG dinucleotides. The Discovery methods and comparisons of EXAMPLE 1 resulted in the identification of 712 unique marker sequences. A subset of these sequences were eliminated, because of high (>50%) repeat sequence content. The 509 remaining sequences were further selected according to the following scoring criteria and procedure shown in TABLE 4:

TABLE 4
Scoring Criteria, and ‘Points’ Allotted in view of Same

| Scoring Criterion | Allotted points if criterion met |
|---|---|
| Appearance (i.e., differentially | +1 |
| methylated) using multiple methods | |
| Appearance in multiple pools | +1 |
| Located within (or comprising) a CpG | +1 |
| island | |
| Located within the promoter region of | +1 |
| a gene | |
| Near or within predicted or known | +1 |
| gene | |
| Known to be associated with disease | +1 |
| Class of gene (transcription factor, | +1 |
| growth factor, etc.) | |
| Repetitive element (negative score) | −8 |

[0158] Under this scoring scheme, a MeST sequence receives a point (+1) for satisfaction of each of the above criteria, and receives a score of minus eight (−8) for having repetitive sequence content greater than 50%. The highest score possible is 7, the lowest is (−)8. Scores are automatically generated using a proprietary database. The above-mentioned 509 MeST sequences were further analyzed using the above scoring criteria, along with manual review of the sequences, resulting in identification of a preferred set of 266 unique sequences.

[0159] Primers were designed for these 266 sequences for the purpose of bisulfite sequencing. Forty-nine (49) of the sequences were not sequenced for various technical reasons, or changes in scoring according to the above criteria, based on additional information (e.g., updates of the Ensemble database).

### Example 2

### Bisulfite Sequencing

[0160] For bisulfite sequencing amplification primers were designed to cover each individual sequence when possible or part of the 1000 bp flanking regions surrounding the position. Samples used in Example 1 were utilized for amplicon production in this phase of the study. Ten to fifteen samples each of DNA from normal adjacent colon, colon adenocarcinoma, and normal peripheral blood lymphocytes (PBLs) were treated with sodium bisulfite and sequenced. Initially, sequence data was obtained using MegaBace technology and later sequences were derived using an ABI 3700 device. Traces obtained from sequencing were normalized, and percentage methylation values calculated using an ESME™ analysis program (Epigenomics, AG, Berlin).

Results of Bisulfite Sequencing.

[0161] The following properties were noted (screened for):

[0162] (1) Bisulfite sequencing indicates differential methylation of a CpG site between selected classes of samples (Fisher score);

[0163] (2) Co-methylation is observed;

[0164] (3) If only one site has fisher score >1, are there additional sites surrounding with fisher score >0.5?; and

[0165] (4) Are there trends in the pattern (e.g., blocks of blue (black) vs. yellow (light grey)), but not necessarily high Fisher score.

[0166] FIGS. 1 though 3 show representative ‘ranked’ matrices produced from bisulfite sequencing data analyzed by means of the proprietary ESMET program (Epigenetics, AG, Berlin). The overall matrix, in each case, represents the sequencing data for one fragment. Each row of the matrix is a single CpG site within the fragment and each column is an individual DNA sample (sample designations are shown along the X-axis). The bar on the left represents the percent of methylation, with the degree of methylation represented by the darkness of each position within the column from black (Blue) representing 100% methylation to light grey (yellow) representing 0% methylation. Colon cancer samples are shown to the left of the vertical black line, and healthy colon samples are to the right of the vertical black line. In FIG. 3, peripheral blood lymphocytes (PBL) are grouped to the far right of the matrix (i.e., to the right of the second vertical black line).

[0167] FIG. 1 represents the sequencing data for a fragment of SEQ ID NO:1 according to EXAMPLE 2 herein below. Each row of the matrix represents a single CpG dinucleotide site within the fragment and each column is an individual DNA sample (sample designations are listed on the X-axis). The vertical calibration bar on the left correlates the intensity of shading or color with the percent of methylation; with the degree of methylation represented by the darkness of each position within the column from black (or blue) representing 100% methylation to light grey (or yellow) representing 0% methylation. Colon cancer samples are to the left of the central vertical black line and healthy colon samples are to the right of the vertical black line.

[0168] The Figure shows a representative example of a genomic fragment (SEQ ID NO:1 ) exhibiting mosaic patterns of methylation in normal samples, and extensive co-methylation in cancer, positions below the horizontal line (denoted within the limits of the left curly bracket) were considered to be particularly informative.

[0169] FIG. 2 represents the sequencing data for a fragment of SEQ ID NO:2 according to EXAMPLE 2 herein below. Each row of the matrix represents a single CpG site within the fragment and each column is an individual DNA sample (sample designations are listed on the X-axis). The vertical calibration bar on the left correlates the intensity of shading or color with the percent of methylation; with the degree of methylation represented by the darkness of each position within the column from black (or blue) representing 100% methylation to light grey (or yellow) representing 0% methylation. Colon cancer samples are to the left of the central vertical black line and healthy colon samples are to the right of the central vertical black line. The Figure shows another representative example of a genomic fragment (SEQ ID NO:2) comprising a block of consecutive CpG positions exhibiting differential methylation between cancer (hypermethylated) and normal colon tissue (hypomethylated), denoted by the left and right box frames, respectively.

[0170] FIG. 3 represents the sequencing data for a fragment of SEQ ID NO:3 according to EXAMPLE 2 herein below. Each row of the matrix represents a single CpG site within the fragment and each column is an individual DNA sample (sample designations are listed on the X-axis). The vertical calibration bar on the left correlates the intensity of shading or color with the percent of methylation; with the degree of methylation represented by the darkness of each position within the column from black (or blue) representing 100% methylation to light grey (or yellow) representing 0% methylation. Colon cancer samples are to the left of the left vertical black line, healthy colon samples are grouped between the left and right black lines, and peripheral blood lymphocytes (PBL) are grouped to the right of the right black vertical line. The Figure shows a comparison of the methylation patterns between colon tissue (both carcinoma in the left block, and healthy in the central block) and peripheral blood lymphocytes (right block). Colon tissues exhibit hypermethylation in the subject representative fragment (SEQ ID NO:3) as compared to peripheral blood lymphocytes.

The application's sequence listing, which the Patent Office published only in electronic form, follows.

SEQUENCE LISTING (225 sequences)

SEQ ID NO: 1 - DNA, 2475 bp, Homo Sapiens
gctacaaaaaggttaacagataagcattttccaagtaacaaagctttttctactacatgttacaggagccattgagtgctcttgcaaagaaaaccagcactacaaagtagtaaattataagtgatgcaaacactacctcctgtagaaactcacaggaagggaagccaggtagaggcatgctcccatgccagcaggtggggatacaaatcctccttctgctacctttccagaagaaagttagcaatagagatcaagagcgtaaaaaaaaaagaaaagaaaaaagaaaaaaaaaatcatttcgacccaataattccacttctaagaatgtatccttaggaaaaaaaattagacatttgttcaaggatttctgttgaattttccttataaggttattatattatcaaatagaaacaactgaaacagccaagttgggttacattatgggacatgctcatgatggcatcatatttaagtgacgtttttgaagcacggtagtgacttttggaaaaggctcaatacatcattttaatgagacgtgcaaactcatcattacgatatactaggagaaatgctttgacagacgaagtgggaacaactgggagagtgaatgatggagtgtcaggaacaggggcatatgagttgggtcttccaggttgtggaggtgtttccgggtggaagagaaggagggaccaagcggagagccctaagtcctgaagacaactgggaaggtaacacacctcttaagaagggcatgcagcagccatacctctcatccgccacggtcagcaaacccattgtgtttcctggagtgagttgggccatcaagatgggtggtgccctcctgctggggaagaggggctcggtgggaatccctgccccaaggcctggcagcaacgctcctacgctgccttgggccgcaggcctgctaagccctccgctctcgcttccctgcgcgcgaaataagtcccagggccaatgtggcctccccacccagtgcttccgggggcgccaaaaaacgacctgcccagaccctcagcgtcgacgctgcgcacaagcgcagtcaactgctggacccggccggtgtgaagtttcacacccaaaaggatgaagggcacccacctggcttaagagaacgactcccaggtaaagggccagacccaggtgaggagtcggcacagggccagaggtgccctgcacactcagagctctccctttgagctccttgccttgctcggttctcctgggccgcaggcgtctaccctgctctctggggttccgctgccttttccttgccaggtctttcccacagcaacgccttttctcttccttctccagcctctgagtcctcttcctcctctccccactgtcccacctctgagggacagaagtggggtggtttgagagcaggagactggagggaagaagcaagtccaggcctagctgcaagcactccccacccccgcccccgcccccgcccccgcccccgccaggctctaggacacttgacttctgttaggcctcacacggtttggtctgaagtgtttctctcttaatagctgtggatcggcgaggctcaatggctcacgcctgtaatctcaggactttgggaggccgaggtgggtggatcacctgaggtcaggagttcaagaacagcctgaccaacatggtgaaactctgtctctactaaaaacacagaaaattagccgggcgtggtggcgtgcacctgtaatctcagctactcgggaggctgaggcaggaaaatcgcttgcacccaggaggtggaggttgcagtgagccgagatcgcgccattacacttcagcctgggcaacaagagcaaaaaactccgtcaaaaaaaaaaaaaagaagaagaagttgtggagctgtctgattcctgatcctgtccgttcaggctggggccgccctggtctttcaaacccagcagtgagcttggacagacccagaggtgtttactccaggtaataggagctctagacaaaatcaggctcttttcctggcttagacctctccctgcttacaacacctctaggatgtgggatatctagaggtctgtgtagctggaggatgctgggaaatgtgaggagaagatgtttcctccttaaaattggaatctttctgatcacctgaattctcctgctagccacaaatcccactcactcttatcttatccttgtccttctgtcatcgtttacctgcctaatccctgaaggtagtgagtttcctgtcactggaagtgcacttctcggtacccttacttgtagaagttctcacagatgctgcttctcctctggctcagatcatgtctactgtgaaggaagcagcacaccggctgtccaaaagtgagatgagcctctatgcagtgctggatcttaagaagggcgcctcacctgaagacttcaaaaaatcctacaggttcagacctcagccctttattgatccttggaatttccccctta

SEQ ID NO: 2 - DNA, 2229 bp, Homo Sapiens
tctttcctcggcgctggctggtgcgggttggggtcaggtggagaagccgctctttgttaaggtgacagaacgtgctgggggtgggggccggggccagggccggtgcaactagggggccgctgccctttcctggacacagtggaagcttcttccgcatcaccaaatttttgtcatcctttctgagggacctgcttccaggcagcacgcaagttgttgtcccgggtttactccgcacccctctactgggtgaggaaggagcatcttgaatggagatgggggtgtccccggtttatacatctgcagagaagaggtgtgccgggctgcacctctggaggccgcggtaactgatattagagaagaccccggttgcagctgggaaggctcactggctggaaagaggtgcctcctccttccagcaaagggccctgtttggaagggctgcttctcacctgtctagtggcaccacaggacggtcggcttccactcgaattcccccggacggtatcatcacatagccgggtcctcgcagtgttggtttcccaatccgatgactgtcacctcggtgaggacctgtgctgatggccggagaaccctgcgctgcgggcgcacatggccaggtggcgcctggcaggcgacgtccgggtgcaggacggcgctcttaccgccccaccccaaaccgttgcctgggcctaggtccttcggcttcctgaacaggggtttggggggctaaggacgctgaggctccgggggcaggaagttctctctggttaagcgttctctcttctctccggcatacactcccctacccacccacctcgcctaccctcggggcgagaggctcaccaaggcagggcgcgccccccccatgaatcatcccaaggcctctgagccgcgggggctccgggcaactatccccctcctctcctggcctcaggcaccccagtccaggggtctgcagagaagcccgaagcccggacaaacgcgccggacgtcaacaacctctcatccctggcagcagcaaaggccaatatatttccatttcttatttcagtttgccaccaaaacaaagctgcgcgcggctgagggcaggaaggcgctgagaccgagaagaagggacgtcccggagaaagtgcgcccagctgatcttagaaaccagagtcctccgggacttcgccgagattttctgtagggcgttttaatctgttttcctactgcgtgccggcgtcgcagcgcgtgcggctcagggcttggtgactccggcttagcccggcggtcgcggcgaggttcctggcgcagccgcttggaacttcgcattagaatcgggaccgcgcaaatgccctggctgaagtgtcaccctattcaagaaacactgctgtcaggaacaaaatggggtccccggtgctccgaagtatcttctgaaattttcttaaaacaacttacaaaaaatgtttttgctttaacgttttacaacgtttaaggaaacatgtaaatggtctgtttctttatcgagatggtcgtcctaactaacagtgtacacatacataacaattcttccaactttcctcctcagagctaagcacttcactatatgtaaattataataaagaaaagattgtgcaagatcatgcaagtcgattgacttaaaatattgagttttaatccaggccctctgtttttctatttaacaacttttgtgtttggaccagactggtgaagcaggctatggaaattaacaaagtaaaaaattaaaagcatcttccttcgccatccctccctccaaaattaaacaacagtcgccccttcctgagcaggcttcagtcccaggctcgagttttcctgcgatcaccccacagtcacccacagcagctgttgctgcttctgtcgggttttcgtttctgccttctttgggtcgtctcttgtatacaaaacacaccccagttctctaactaaattcaaatacgaccccggcagaatttacacatttcgtggtgcatggattgtgtcggtgcaggggaaataaataccctctggtatttaaccactgagtctaattcgaaaaatcgggactgggcccctaggcggcaccccaggggctccaacctggcccgcgcctccccagaccttggcgctgagagcgctgcttttgcgggtgggtggacggagaggtaacaatctgctttcaacaaaaacctgtcgccaccgaatcgaaagcgaaagggaagggagaag

SEQ ID NO: 3 - DNA, 2475 bp, Homo Sapiens; identical to SEQ ID NO: 1

SEQ ID NO: 4 - DNA, 2345 bp, Homo Sapiens
gcgcccggccgtcacttttcttcaatctcactggtgctcgcgggctgaagggtcaggacggactagaggcgagcaatcccggtggcaccaggcattccccgacctgcccgggtcgccagctgcacggaccctgggcagatgcgcgcagcggctgcggcacagggcggggagcggctgctcggccccatcctaaggcagcagaatgcccagagctggtccctggctccaggcgcaggccgagtagcagctgggcgggcagcggcgtcgggcaggcccttccagccgggctgacaggccgctctgacccagccatcagactccgcttgcgtcctggcagcgcggaccctagggcaacttcgctgcagtggccaagccgggggcggaactggcccatacccctgaaccgagcaagcctaggagcaggtgcgccggcggcgctgtgaagcggcactcatgacaggcaggctgggcgccgccaccccgaaacctccgagggaggaccagccagcccaggttggcgctggagctgcagcgccacctgcaggccaagaagtctttttctgggaggctggagctgcagcgccacctgcaggccaaggagtctttttctgggaggctggagctgcagcgcgacgtgcaggccaaggagtctttttctgggaggctggagctgcagttgcagtgaagtcacaggttccgtgacgtcacaggtgggcaggcgcactagtctgtaacggattggcttggccttacccgcgaggctttgcagtggctgcttggcttggcagtggtcgcttggcttggcgtggcagtgatcgcttggcttggcatttctggcttagcggtcctcctttcgcagattggaaaccgcgggctatcctgctgggaggttgtggccgaggcagtagctcgctactgatggtctcctggggtggagaaaagcggggaggggctgaggggtctccgaagccggcagtctacgccacgaggaaaaccggtagcgtcaggagccaggaggaccagtggtacttgggctacccgggggaccagtggtcctcgggcttctcctacagctggtggaaaaacagcgtcggcagcgagagcaagcacggtgagggcgccttagaccagccccagcacgatgtccgcctggaagatcttggcgagctccacagagctgcccggtcgggcgacgtccctggggtggagcacgtcttggttcctggagacactggcgtggacaagagggataggaagaagaggtaatggccaggcgaaggatgcgggcgcgccgtcctgtcggggacactggctttctggtgcccgcaggccccacggcacccgggatggggaaacgtcagaggggtcaggggcccaggcctcttagtgagacgggatcaaatataaaggattattactattgcaaaagtgttggtctactttacaggagttttctttaaaaatattgcacttcccaactgtgtttatccattttctcaatttattcatcaaacataagggccgggcgcggtggctcacgcctgtaataccagcactttgggaggccgaggcgggcggatcacgaggtcaggagatcgagaccacggtgaaaccccgtctctactaaaaatacaaaaaattagccgggcgcagtggcgggcgcctgtagtcccagctactcgggaggctgaggcaggagaatggcgtgaacccagaaggcggagcttgcagtgagcggagatcgcgccacagcactcccgcctgggcgacagaacgagactccgtctcaaaaaaaaaaaaaaaaaaacataaactgaatacctattatacagcagacatattctactgtcgctcaggttccttccatccttaagaacttcatgttggccgggctcggtggctcatgcctgtaatcccagcactttgggaggccgaggagggcagatcacgaggtcagaagttcgagaccagcctgaccgacatggtgaaaccccgcatgttatgcttttgtctcagcctagacttagctaaaaccttcatgacaaattatcctttaggccctcggggttcagttcaaataatgttgcagaaagagatgagtttccttttctcattgctaccagatctgtatgctgaggacccttttcttagatcgtggaatgtcccatattatcctttcccagatttgtggcaggaagccatcaccagaattctgagtctcaagcatgttagttggatttaacagagctaagtctcatccatgactcatgaatatccatgtataaaatgagagctttggcagggtgcagtggctcatgcctgtaatcccagcaatttgggaggct

SEQ ID NO: 5 - DNA, 2291 bp, Homo Sapiens
gttccaattttagtatatgtttgctgctgaagcaagttttgtttgttttagactgagtcttgctctgtcacccaggctggagtgcagtggcgtgatctcggctcactgcaagctccgcctcctgggttcatgccattctcctgccttagcctcctgagtagctgggactacaggcgcccaccaccacgcccggctatttttttttgtattttttagtagtgacggggtttcaccgtgttagccaggatgctctcaatcacctgacctcgtgatccgcccaccttaggctcccaaattgctgggattacaggcatgagccactgcaccctgccaaagctctcattttatacatggatattcatgagtcatggatgagacttagctctgttaaatccaactaacatacttgagactcagaattctggtgagggcttcctgccacaaatctgggaaaggataatatgggacattccacgatctaagaaaagggtcctcagcatacagatctggtagcaatgaaaaaaggaaactcgtctctttctgcaacattatttgaactgaaccccgagggcctaaaggataatttatcatgaaggtcttagctaagtctaggctgagacaaaagcgtaacaggcggggtttcaccatgttggtcaggctggtctcgaacttctggcctcgtgatctgccctcctcggcctcccaaagtgctgggattacaggcatgagccaccgagcccggccaacatgaagttcttaaggatggaaggaacctgagcgacagtagaatatgtctgctgtacaataggtattcagcttatgtttgatgaataaattgagaaaatggataaacacagttgggaagtgcaatatttttaaagaaaactcctgtaaagtagacgaacacttttgcaatagtaataatcatttatatttgatcccatctcattaagaggcctgggcccctgacccctctgacgtttccccatcccgggtgccgtggggcctgtgggcaccagaaagccagtgtccctgacaggacggcgcgcccgcatccttcacctggccattacctcttcttcctatccctcttgtccacgccagtgtctccaggagccaagacgtgctccaccccagggacgtcgcccgaccgggcagctctgtggagctcgccaagatcttccaggcggacatcgtgctggagctggtctaaggcgccctcaccgtgcttgctctcgctgccgacgctgttcttccaccagctgtaggagaagcccaaggaccactggtcccccgggtagtccaagtaccactggtcctcctggctcccaacactaggggtcttcctcgtggcgtagactgccggcttcggagaccccccagcccctccccgcttttctccaccccaggaggccatcagtagcgagctactgcctcggccacaacctcccagcaggatagcccgcggtttccaatctgcgaaaggaggaccgctaagccagaaatgccaagccaagcgatcactgccacgccaagcagccaccgcaaagcctcgcgggtaaggccaagccacgcgggtaaggccaagccaatccgttacacaccagtgcgcctgcgcacctttgacgtcactgaacctgtgccttcactgcatctgcagctccagcctcccagaaaaagactccttggtctgcaggtggtgctgcagctccagtgccaacctgggccggctggtcctccctcggaggtttgggggtggcggcgcccagcctgcctgtcatgagtgctgcttcacagcgccgccggtgcacctgctcctaggcttgctcggttcaggggtatgggccagttccgcccccggcttggccactgcagcgaagttgccctagggtcggcgctgccaggacgcaagcggagtctgatggctgggtcagagcggcctgtcagcccggctggaagggcctgcccaacgccgctgcccgcccagctcctacttggcctgcgcccggagccagggaccagctttgggcattctgctgccttaggatggggccgagcagccgctccccgccctgtgccgcagccgctgcgcgcatttgcccagggtccgtgcagctggcgacccgggcgggtcggggaatgcctggtgccaccgggattgctcgcctctagtccgtcctgacccttcagcccgcgagcaccagtgagtttgaagaaaagtgacggctgggcgcggtggctcacatctgtaatcccagcactttgggaggttgaggtgggcagatcacttg

SEQ ID NO: 6 - DNA, 2170 bp, Homo Sapiens
gtgattttttttcttaggatttagcagtactccaccgcgctacagcagttagcatttctaaagcacacactccaacacccttcggccgtagcacattcaatccctccgccggggcgtgggggtctcctcccctccgagcacagtccccggcttcccgatttcctctgccccatccccccgccttccaagcacattgtgctcactcttccaggcagctctttcagcggccgggcagtagcagggttccgagcccgtcttctccggggcggtcacacgtgtccattccctggggttggggatcgctcttcccgcttggctgctgattggtgcctccccctaccccacccttcccgccgctctccagcctccatcctacttcgttccagctcaatcagccccaccgccttcttccctcggagaaaaaagccacttcagagctccttgggcgccgttctcggctggaataaaagcgttaagaaacaggtggaaagcacttcacttctctaggcttcatatttctagggtggacagcccgctcctgctccggctctgccctcggcatcaataataactgaactcccacacgtgcacgtttctgtctctagcccgaccgaaaggaccaccccgcgggccctttaaaaggacgcgaccactcaggccaagtgggggtgggagagctcctggccgtcctcccttgggaaagtgcttcaactccccagtcccaaagtcctggagggcggagggcgcctcgtgagagttctcgggggtgcggcccgcgccccctgggtcctgcggatctgggcccgggggcgcgcgccccgcccctccccctccctggcggtgcagctgtccgggcgggggtggggcgggggccggggcccgcgtgggattaactaggaccggggcgggagtcgaccgcggccggcggggagggctagccccgctctggcgggcgggcgcgtggcaggggctcccggaggccccgagctcccgggaggcgctccggccaacttcgggccggtggggaccgggcctgggcgcggggctctgaaggtgtggaaggaaagtttgggactccgttattcttccacagcgtccttcctcccgtaatatccagcctctttatcgcggggctcgggagcccttggagttgatctcgccaccattatccccccgggcgagcgcggaggacgggctggccattctggccaggccggaggtgttttccagcccggggctttgtgataactgggccgaaacccgagggtcctggagcgcggcgggtggcgggagcttgcggagcgcggcgcactcggcggccaggcatcggccagcccagcggcagccccctttctcctatttttatttttatttttggaaggagctgagaattagtcgattggttggcaggttgaattgccttctcttctatggcaatatgtgtcgtgacttttcaccttttgcctttggacaaaggtgaatggcaactgcgttggtcagtttttgttttctgttctgcggatgggttcgccgacgcagtaatcaaaattagagccactcttttggaagagcaaatcgttgttgttgcctccccagccccacggatcttactttgtgccattttcgggttgattttaactcgtttatttcagagctctttgcctcacctttatttttagatttagtcgtgtttgctgaaatatcagttgcttcttctgtgaatgaagtgtgggaacttgctctcgtcgcagttaatgaaatcaggaaaataaaaagatcaaaagggttggggatgggagaatgaagaggaatgtagacagatagtctagggccactcactggcttttggcgattcttagttccttaagctgattaaaacaatgtgaggaaatgtgggcttctccactttttaggaagaggtaataacgggcattttacgtggcgccacagcgtttgttttcaaagtttgaacgtgaatgtagcaagcataattttattaatgaaaatattctttagacaactgttaatattgacgaaagaagagaaacagagacacggaagctaaagagttgggaatcctaaaggtcaaaggatgtttctcagttactctgatgtcctgtgttttctttcagttggtacaaaatcgtgagtagtttaattatatcctgca

SEQ ID NO: 7 - DNA, 2377 bp, Homo Sapiens
ccttggctgaagttgcggggagggggagtgaagtagcctggactgaacaggacacattgaaggggaagcagtaagagtggtgagtggtattacctgatgttcaagtccagcaggatctgctcttttctctgacctgggtgaaccttgactccaatgatgcgcaatggctagggagagagaaattcctgagagagggcagggatagggagaagtacctgagtctactccgggccactcaccctccctagcctacctcctcactttccctcctccacacataccttttcacccagttccactcgtgtaaatgtaaatgtttgcagatgggggttagatcccctaacagccggagccacagtttcagccagaagcttctccatatactggcccaggaagggccagacctgggccacaatctgggaggaaagagagatggtcagaggagagtccagtcttccctctcaaggcaagttccttcagaatcctccccacggagagcactgagggttgaggatgggtctggcaagaagaaacaaattcccattctcccctcatgaagactaaaaatcaaatcaatcctcaccttattgagccattcagccttttccacgtctgggaagctgacctggaggtggggaaggcagagacagtgacgtgcagcacaccctcgcctctggtttcctactaagatgctggtggtgtgccacagaggagagggagtgtgtgtgactcctcacactcagggtgggcgaggggcgaggatgccccaaaggttcattcctcacagagtttgggggctgatgtctctctaataaggggagctgacaaggtagaggtcacgctgttgccctgtggatagctcagggacgtggtgaaatgacagctgctgagagagagaggagcgggaggaggagaagggcgcattctttctggagggggaggtccagtcaaattggagtttgagggaatcctgggatttaaaaagtcctggttccaggctggccgcggtggctcgcatctgtaatcccagcactttgggaggccgaggccggcggatcacgaggtcaggagttcgacaccagcctgaccagcatggtgaaaccctgtctctactaaaaatacaaaattagccgggcgtggtggcgcgtgactgtaatcccagctacccaggaggctgaggcaggagaatcgcttgaagaggcagaggttgcagtgtgccaagttcgggccactgcactccagcttggcaacagagcgagactccgtctcaaaaaagaaaaaaaaaaaagtccccttttccagccttctcaactcccctcagacggggcttctagagcaggaaggtgaagagggaagcaagtccttccttgagtcagggaggggccagaagacctaattaggcctggctttgtgggttttttggggtgtgtgtgtgtgttttcctctatctttctctgtgtgactccttttaagggaaaggacacctgcgctttgtattgggggtaggaagattggtttccatgatgatgaggaggagacaaacacttgctgcctaggctacaggtcccctagagccatttggccctctttctcctcccctttccagtccagggcctgggaagcttggctgtgtctgtctagtgtcaattttgattcctctctgctgccattctccccctagactggcacctctgctgggaggggccgggtaaccggcttcgcctctgcaagactagagagaaggcatccgcctcagcacaggagacgcggccgccgcagaaataagggtctctgccccaacggaacaagcgcagcccacagtccggaaaagggtgtggccggccgaggagtgcgggggagtgtgcgccgcgggcactgcagcagccgcaccacctcctcccgtagccctccctccgtccagcagccgcctctgccgcgctgcagtctggcggctggaggcttgaaggtggctgcccgagggtcgtccaggggccggggctgggtcctagcgggtacccggggataaaagcgagaaaagagagaaccgtatggctttaagtaggtaaaaagtctcgaggaggatgggaaagactagggaaacctttgagaggtaacgggaccaggatttccaggagcagcaaagccgcgagtggcaccaaaagcaagagggacgttcaagatggcttggctaggagggagagcttcggctgagacggggtccccagatgttattactgctgttgcccaagtagaggaagaagtcctgattctgtggaaggatccagtctgggcatgcgaaagggtgggtggggagagtgagcagtcggttccaagagtggcgcgtccagcaggcaggcggctagcggggagagagggg

SEQ ID NO: 8 - DNA, 2356 bp, Homo Sapiens
caatatatatttcttaaggtaattaaagggaatacttatttttgtttgaggaaaaaatattttgtaagctaaaacttttattaacacagtaccctattacatgacttcttcctcttattccaaaataatggggcttaattttttgaagcgcagtctttccagtaataaaggcggacaaatttgcttccttttgcaagtagacactttttaaaggtaagaaagggaagattttgtcagcccagtttattacagttaatgtctctttcaccaagtgtccaactgccccgaaagccagatgtttcagaaagccagatgtttcacagctgttctggtggcaattacttcaagacagcggtatcaaaggctctgatttttagcttcctcatctaaaaaatggggacatcaattactttataacaaagctctgatgatacaatgagattacaaataaaatatcctgtgatgtttgactcactacttaactaaaatctttataatggatccatattcctggcctagctaccatacaccctgtcaagtggtttccttctaagaaaaactggggatgggggggttaggggggtgggagagcagcagggagtaggaggtagggaaggaggaaaacaagcaaaatcagtacatatacaagctctcccatctttgattgcctgcgttttttgtgctttcctttctcaagtttcctcaggctcatgttctgaatctcctcccccacaaatgaaacacaacggatacgaattacagagaattttacggaagacactggagcttaagtctgcagattagttttttgtctacaagcggaggcgactggaaaatcaagccaaataagcgttggataactctaaacagccaaagaagcttcaatgggatagggtccaggttcaccaaaggaggcaacaccagcaactgacgaaaccatagcgacggctgaccgaccatgactcgaggtacaagacgtcaaacctaaggctactaatcaacgtgcgtaagaagcggccccaaccgacccgggcgatgccaaccgcgcaaccactggtcgccgcgccaccccaggcccaggaatagcccagtccgcaacagggagacctcaaccagggagaggaggagcggggcaaaggggctgggtgtcccccaagccgctgcgcgggacgtggaagggacgaaagaggtgaggaagagtagtaaatcaattcaatacactcacacttctgctgtgctcccaggactacgagaagcgggtagggggcgactcccggcctctttcacttcgtaaaggccttcaactgggtctctcggtcaacccctcagctaccgccatcttgaaacctcgcgcccctccgcactcctcacgtcatttcccattcctctgtcccgccttctcttagcgccgcttgaccctggaaccatagagaatacccaagaattccaggaccagagtctcttccggttccatacaatactcaattggttggttgtcggctaagagcccgcctcattgcgctcatctagtacaataggaattagaagaagatagctgctaactgagtggctgacggtcctgtctctcgagttggaggcatcttgacttagttgctgggagcctggtacgttgagccgtccgagaacggtacattctgcagataaagaagcgttctgcgttttctgtcttttggaattaccttagtttttgcatttttctgtttcttatgacccaagcaggtgcgatcctttaggggtgtctccgtgtgtaaacgaatacccagataacatttgccactgagtttaatccgctttgtaagcatcaggttatcccatgtgagcgcctagtacgtgtggaaatttaatagacaggcagaacagaacgtttgtagaccacctgaacaaataaattagcacccgtattagagtcgcagattgcttatatgggcggtgatttattatttgttagtagtgttttgaagaagaaatacggggatacatatgcagtcggttttaagttatatgagtggcaaggttgatatatattggctatattcccgactggtcttttcaccagccaaaagtcctctatgatgtcactctacgtacgggattcttcacttaactctagccttcgccctttccctaccttctatcccctctttccgtgagtcagcccccacttatttcccttaaaggtaagtttaaacatttaaaaaactatcttagaggatacgcttggttatttctaatcttaacctgactatcccatgtaggaaggctattcttaccaccagttataaatatttcaaaatattgatggagatacatactaatttttagcagaatctttaaa

SEQ ID NO: 9 - DNA, 2403 bp, Homo Sapiens
cgcgggcgcgggagtagccccgctgggcgctcgcagccgcgggagtcaagccccctccccaggtgcaggcataaaagtttatggctcttgaacaatgcggggcagaggtttttccaagcaacgtctaattggccgcttctaattaaggaaagagaggcttccagctctatggcaacccaagcagggcagcttcaggctaaaggtactttagaataataagatcattctaagaaatggaatgtctcactggacacccgaacaggttctctgtcattggaattggtgtgtactgtacttcaaccagtactcttgtgtggagggaggcgacccagtctaggaaagtcaactacagaaagaggtgacctccgaaaggattgtcttagcgctattagaatacatgtgaccacaccaaaagcccaggcggacacccgcagccagctcggatttggacaattcaacattgctggcagaactgaagggaacaagttaccccaaccccatcccctgtacgcgtagtgctgagtgagttgggggtgggaggacagcggttcgtttattgcccccttttaaaatctgagatctgaaaatatggaggtcccattcgttttcccagctcttgattgccaacaaaaaaacaaatcccgctggctacattttctcctcattccaaaatagcaaccctatggcttgtattaagcccttcagaagtttatctcatttgctctgggccagggagggaacaatgctaggaaaagtcaccggtgctcttccatcctcgccccttccagggtgcaggatgtgcgggccggcgggcctgtgatcccggaacgcttcctgccatccccttgcgcgaacttgaaaggactgggaggtgttgagagcagagttcagggctggtgcactctgcggtgctgagtgggcggcgcgcccgggcgctcaggccgggggacctgtagtcgccctaccgcggaggggaaaatacgtagctggagggcgtgcgccgtgcgggttgtgatccgttaccccatcggtcatcctggggtctccccaagcctctaggtagggctgtgagagtcccctagagctgaagccccggaggctgacctgtgggtctggctgctatgggaacccggttggtccaaagaagcctttcttccgggcacctggaattccagtttagtgtggggcatcggggaagtggcgctggggggctgggttgggggacctcagccggcagctccggagagggcctacccttggggtcgctgggtgaggccggcacgattcttggctccaaaaggaaagtttctgcttcttgttctggcgcgagaagccaaagacttattttgagagcggagagagaaatgttattggtaacgttttctttggaaagttcgagaggggtcttctggacacactacctagtgcccccaaaccagagaagtagtttttctttggtgcctgggctcagaagtcgccactcactcagcccatggttcgaaatcagcatgggaagcgccggggcaaggcttcgtcggagactagaggcctgcctgtcgggaggagcccctgggggatggggaccccattctcctgcttgctctggttcccacctgggacgcctccgtaggagcccagaaagacgatccactacatggtcccgggacagagcagcgcgcccaactttgagggaactttgtgcgcctctctgaggccctagctttccaaggcaccgccgtccgttcttctttccctagaccgaaactggggaagagtgtgggcgcttctttgccccgatgagttcgcctccccaaacgcctacttcggctgcaccagagcatctgggaaactctgaaaggtgcccaggcctcacacagcagcgtctccctactcagcctctgtctttgggttttttcaagagagtctctacctcatgcctcggtctttcttcgatgtcgggtccccgaggtaggcacggagtccctctgaaagcagttgcctatctgtgcccctttggtgtaaagttagagtttactttgttgggggaaggggaggtagaaaagatcacagttgggaaagtgcgcttttcgccttgttcctaaaacatgcctcaagactgtcatcgcgattgttaggagagctatcaacgtctaggggctataaaggaatttctgaaccctcggcccttcccaaacccccaggttcctaaaaccctagtgggggtctcttggggctgggattcaggctggcaccgctgggaggacctcgcctagcatccctttattaatatttcacgaaggcaggctcctgccttctctggagcctcttttctcggaatgttcccaaactctggctaactcactcccctgtgagccatcctagggctctgtggcccgggaagag

SEQ ID NO: 10 - DNA, 2354 bp, Homo Sapiens
tacaacttctggagtcgctactctcggtttactaccaccgattgccctgggtctgatggagccagtctcgtaatacctgcccagaattttactcacacatccgttggacacctgcataggggaagtggacagaaaaccacattattaataatttcaagacaaaaataaaattgtttaagtatgcattaaacaatgacaagcttacgttttgattgtccagcacttggacttttgcatctgcatgggtctataacacaaaaatataccttcaatggtatgagaacttactgtagagagctttttttcttaaaattacatttgtagccctaaaaactacaaatatgatgatactttcaaacaatttgaactaaaaaacgaatttaaaagctttttttaaaaaaaaaacttttcttaaacactgcctgaagatgcatcaaaacgaagtagataaatttatttttgtgctgaccttgcttaaagtggcgttatgttttaaagaacaaaggtaaaaaataaactgatttttttacttcttcttctttaaaaaatactcaattgagtaaatgtgagttagggaggagtaaatagcatttgccttttaaaatcaatatatattattcataaacatgaagaataaacaaatacctcaaaagctgaggtaagcatgggctggggagagcagaatgaaattatgccggtttatataactcagcttattacggttcataaactgttcccacaatgaatgtctttaccaaataaaaagagaaagatttttttaaaaaaatccgcacacaatatttttctgaagcagatgagttatcttatgtaactgacccaggttgaaagagatagggaaggatggtggaaggagaggggaaagtgggaaggcaggggagtgggtggggggactggggactggggtgggtgagggtgggggggtccataattagcatcgtttacagtaagaaatgaagagagggcgttgagagtggagggccgcgggggcggcgagtggggcggcgccgggaggatcacctgcagaattcgggaaatgtcgcacggccgggccccgctgtgagctagctctacaatcttctgccgggtggagtccggcagtggccgcccgttgacaaagacaccaccgagctgattcactccgctgtgacctgaggaaagggagaggagaggaaaggggaaaagaagagaagagagcagagtgaagaggaagaagagggagaagaaggaagaggaagatgagggagaacaagaacagaaaggagaggaggaaggggaagaggaagaaggagaggaggaggagacaaccacaatgcatcctcatccccctgccaacctgtgccaacctcggcggtcagttccctgctatcgatcaaataaaggacaacaggaccaccagccatgccagacatcgggcagcccagtccaagcaaccgtgcccctgcccactgtactgcagcagcaacacagagtcagacacatgccaaggaacaagtacacatggacctcactacagccataaccccagcagtgtccccagcccactgcccctcttcataaacactgcagccagcctctgaacccacaaagcgctaagaaccggctctataaatctcccaaagatcccctctgagtgtcaccgcaaaccatgggttctacagatcccacactgaaccttcaaggtctctgcagtgttgggacagtgatagcaaaccttacagcccttgagtgctcccttagacgctaaaatccagaaatgtttccatcaccgtccaaactggccaaggcctggcacaagcatcgagttgggttttgtttggttagaatagaagaaggaagaggagagaacaaccagagcagccagtatgtggctggtgaaccccagtccaggtttccgcacctccagtgcagacgtgagagtcagagcccgggctcggcttcagccacagacaagtccggccaccgcaagtaaggcttagagccgggagtcggttcgcaccagccactgctcgctttatttccgccgctgaactccgccctccccttagccaaggatagatattatcaaaaagaaaaaacagaaaagaaaaataccacatcatagtgttccccatccctcctttatctttgtatctcacaacctcatccctgtggtccaaccttagagaatagggagagggagttagcccctctttgtagtccccctccccaaaaaccacagacacacaaagccaattgccaatttccacttccttaaaaatctccaacctgcagccccgacttagatagcagccctcccaggaaaagacgtggctccctgttcagctctcctctcc

SEQ ID NO: 11 - DNA, 4102 bp, Homo Sapiens
gcgctgtcattcaccccgctcctctccgcgcacagccaatggagagacccagtcgaaaccgcgaagctctcttgcaccgggctttttcgcctggtgattgatgtcccagagtcaacagcgagcgagcagccggagcggggaagcagaagccagagaggggaagaatacggcgccccctctctccctcccctcccccttctactttagcctttctgcgcacttcgcttccaagtctccgcgcagccaggagccgctgttgcctcccagcccctgctagctgccccccgagccgagcgcagcgagcgccgccgcccgggccccccggtggggccagggccagcatggagcacctgggtccgcaccacctccacccgggtcacgcagagcccattagcttcggcatcgaccagatcctcaacagcccggaccagggtggctgcatgggacccgcctcgcgcctccaggacggagaatacggccttggctgcttggtcggaggcgcctacacttacggcggcgggggctccgcggccgcgacgggggctggaggagcgggggcctatggtactggaggtcccggcggccccggaggcccggcaggcggcggcggcgcctgcagcatgggtcctctgaccggctcctacaacgtgaacatggccttggcaggcggccccggtcctggcggcggcggcggcagcagcggcggtgccggggcactcagcgctgcgggggtaatccgggtgccggcacacaggccgctcgccggagccgtggcccacccccagcccctggccaccggcttgcccaccgtgccctctgtgcctgccatgccgggcgtcaacaacctcactggcctcaccttcccctggatggagagtaaccgcagatacacaaaggacaggttcacaggtgagtccggcccgcgcgctccccgcctggccgcggcccgggctccgtgctacccctgccccgccgggtggctccccaaagccggttctgcgctccaggtcgcccagctcttcttggtgcttcccccaagttgagccgcccgcccgattctataacgcagactcgccatgcttgaagagttctctcagcctggacccctctctgtctcccgaaggacccctgctcggaggagctctccctggtcccctctccggatccactagccgggtcaggcagagagaaggaggccatagattcaggaccaccttctgcagctactcttggcctgggaatcttagagaaaggggtgcaacgtgaacagtttcttccgtcctggctgctgttctaggacccaggaagcgagccccaggatcagacacaagaaaagaacaggttcccccacctccagtcccctacacacatgcacttcgcgcccctagctccggtgcccgtggtgctgcggggccagtgggggctctgagccccggtaaatcagcagaaccagtggcctttttttttttttccggagagcaggcttcatctgggaggatggcagcggggcttagccgcccaggacagctagcttttcattttcgttctctcccggctgggtgtcctaccccgggcccagccctgttatcttgggcacgaacaatgcaccggtaggctggtgatcggtggcgggaagactactcccgggacattgggtactaagtggtggccgctgccgccttctctgctgcccgctcccgccttcctctgctggccctggctccctctgctcccgtttccactctgggcactcaactctccctctggcgtggatcccttcccccgttctcactttctgctccccttagggttccctggatcctagaccacgatccttccgtccgggctgggaagcagccacaaattgagcccaggttagccagccgatcttagagagaggaggcaggaggcactggctgctgctggcagagatggggcctcctgggggtcccccggttcaagggcccaacagtggaaggggggtttacataactacttgggagaagctgctgagagctagatactgggccaggagattccaaagcacccctggcttcctgcttctgttccaggcagcagcacagccagggaaactgcttctgcagcttcttaccagactctggggccacggcagaagtggtgtggaggctggtgtccagaggaagaacagttgcttgggtctaggcctcaggaagggccctccctagaggggtcccagtgcccccaacctaagttttctctggcctggggcagcagggcctggtgcccatcccattccccacccaggccaggccagtcttgaagggccctgctggaaacccagccgggagtccactaatcctgggcctctggtgaaaggtactcggtttagggcctaccgcggggccctaatactgtgtcaggcatgaaggcggtttcagcgagtgtatggctgtggccttgttttgctctgtgtcctgtgtgcttgtcccgtgcctgtgcttgtctggtcctgtttgggtgtatagatctgtgagtttgcccccgttgtacgttgtgttggtgtgtgctgctgtggatggaggctcaggtcgggttccagagtcaggctcggcctcttactctgagcctgaaggcctggggctgactgaggggaggggagcgtgaccattagctcgccttagactgcccctggaggagaggcggcagggaggtggttgggctcgcgggagcccggggccagggaggcctccgtggtagcggcgacggcggcgtcggactggcgggcaggaggaggccgtttcccgccgtgggcttgtcgctgagggctaacgggaggatctcggccctgctcgtgggggttcagctgctgcgctcgctgactcgcggggtgttgggcctgggacgcttcctgacgctctgctgcttgcctctgccgtctgtctgtctcccgctccagtggccctctcacccttcactgtaacacgccgtataggtcacccctatcagaaccggacgccccccaagaagaagaagccgcgcacgtccttcacacgcctgcagatctgcgagctggagaagcgcttccaccgccagaagtacctggcctcggccgagcgcgccgccctggccaaggcgctcaaaatgaccgatgcgcaggtcaaaacctggttccagaaccggcggacaaagtggaggtgagcaagcggggcgggccggccgcccgcgagcggcgcggtctcaggcagctctcggttcattggcctctcgtggggcgcacatactttttccgctcgcggtttctgatcctttcggaggagcgagctcccgctaggcttgcggggagctggaagcaaccgaggccgatagctgggatggggctgaagagccctggctctgttttaccggaggcttcagggctttctggttggcacactctctgccggtgtagacgcggcaggtctattccgccgcttgggcaaacaggcgggttagtgcactccacgcagtccaggctccagggatctgtgagtcctggggagctttttgtttgcgcaaactcttgcttatggaatcctgctctgtcctggagactggatgcagaacagcccgcaccttgttgcagcgctccagccgggctcccggcagagggtctgtggccccagaccgcggccctgctgacggtctcctcccccagacacccggcctttgcgcagccggtccctaccctggaaggagaaaatcaatccgcgccggctgcggcggggtttcgcgggtcccactggaaggggaatcaattaggagcagatgggtgtgtgtgagaaagagaattttccttctcccatagccacaactctagttactacgcaatgggctttttgttttgttttgttttttcacatttacgctcacggacgtgaagcgtccccaacactctcgagcagcctccctctccgcgcgcactgacgctttctccggctgcaccctctggcacgctgcaccctctggcacgctgcaccctcccgcacatctggcccttgcccgccggagtttctcccctagctcaggccccatggggtagcgcgggagagtctgggcgaagtcggcggcgccgagacgggcg

SEQ ID NO: 12 - DNA, 2337 bp, Homo Sapiens
ggatgacactaaaagccccatcacctggcctcctgccctggggtctccaaggagcaagggaaagttgtggccttcggcctgtgcctggctggtggctttacattcccctacttgaggctgatctcctacttgaggctgatctgctacttgaggtgggaaggggcacctggagccttcagctgcagggtgagagatacccagtggccccatttttcagtctccagagccacaggccaggagcggagggccaaggctggcgaaaaaacctggccatgtggacgggccaaagaccaggggtcgctgcgaaggtgaggacagaaaagcgctgcagaggcccccagactatggctccgtctccgccagagagctttaggggcctcagtggctcccttagtgctgtgtatacacgaggaaaggctagagaatgagagggacacagcacctctccatcccccaagtctgcacggggagaagcggctgtgagcctcagcaccagggaaacgcagcgctggggcctgggcaggactgatcgctccagcctttatctcagctgtaacttcccagtcgaacagggctcgcttcggcgggccagggctctcgcctttgctgaagaattctggctcaggaaagatggagaggctgggggttgaggagagaggaaaaaatggcaggggaggattggaggtgaccgagcgtcgagttttcacatctttattattgttgttgttgttgttattattattattattatcatcatcatcatcatcatcatcatcgaagtatttcacgtccagagctaagacaagactacaaacacaacacatagaaaattaataaaatagaactttgttttcttctgaggctcctcttcttacttctaggtagtatgtgctccttccagtggctttggggagggggtgggagagacgacaggtctgggatcagggagtcttcaaggcccccgctgaggggacagcgaatctaccattgaaccgtgcacgggggacatggacaaaatgagacgcgacagggacaagagcattttgctctgcttccaggaaacatcaagtgagtccgctcctcagttctcaccaggaagcctgatcaggctgaggcgagttcctcgggaaggaagggcgcgcgggatgctgggtgggctcgagtagtgaggcctcagagcacccgccgggagctgtgcgggcgggggcgtccaggagagcgctgggccccgcctgtctgcgccggagagcaggtctcctggctcccccacccgagagccttccttcccgggtctctctgacgcccgtggctccccacaggcctttcccctcgcgtcctccctccctttccagcaccttcactcggcctgtttttcttcctcctcctcggcactgagctgagacgcgctgagcagtttgctctcctttttccacttcatgcgtcggttctggaaccatatcttgatctgcctctccgtcaggcacagggcgtgcgcgatctcgatgcgccgccgccgcgtcaggtagcgattgtagtgaaactccttctccagctccagcgtctggtaacgtgtgtatgtctggcggcctcgccggccgctgggcccaaaggaggaacctgttacgcagagtggagatgctgaggcctgcggtcaccgggcccaggaccccctcccctagtcgaccctcgaacacagactccagccagtaccgggatgccctctattctgccggctcccttcccccgtttcgcactcctccagcgccccctccagattccctcctagtctcctaggcctgtgccgtctgtctagactctagatgggggaggggaggagcagtttgaactcccacctgagcctggggggaggggctggtcaggtgtgtctcttcctagttgcatcttgtctttccctccctttccatccatcttgttcccaccccccgtcatccccccaacccaatgataaatccaggccgttaatccgtaatgacgtagatcgatccatagtccacattaacggctcctcactttcgagtccggctaatggacatcagttgggacttaaggccaacaaataatccaacctgagaccccgcgcctgtttctccctctctcgctccgcctgctccctctctcttccttccccttattcctcctccctcctctgactaccacccctttcctggtgcctcatcttgccccagctccccacccacagggaaacacagtcccagacagactcaactcttcctcttcagcgtcaccccctacccccttgcatgacgcactccgtttttaatggagccgtctttggttggggaaccctaccagggc

SEQ ID NO: 13 - DNA, 2351 bp, Homo Sapiens
cagctgggatgcattgctgctccttccgccatcccagcagctgtccagagatgagacccagccccactgtgtctttctgggattcacaagaatccttccctgggctgagggggcgttgctgtgggtgtatctcatggagagccccaaggagccagggaggagccttctggtggtttgggttctggattggtgggtgctgggtgggtcttcatggctgttcttggggctgccaggcctgcaaggtagacaggcctctggacttgagtgtggctgtggacgagggcagcgtcgccatcagaggcgatgtctagggccaccccctctgacttgcctcctcctccttctgacttgcctcctctctctgacgggcctgctcctgagcttgacacctgcctgggggctcccggcgaaggccgctggtttctagaatgcaccatctcttcctggcatgacgggaaccacctgtgacattgccaccacctcgctgtaatctgggcagcagctgtcatgatcccaccatgtgccccccgtgaggcccccacctgttactgagtggcagggacgtgctcccacacccccatgcgccatcctgcaggtgctttctgctgacttctgtgtgccctggggcctgctctcttggtaggggttgaccctgcctgtgacttagacagcttggagggccaggactgaggggagggggcggtggagtgaaggggagggtgggcgctgctggcaagaaccacaggcaaagagggtgccgggggcagggaaggcctggaggtttgaggagcagaaagtagacccttgaccctccctgggctggtgagtcggggcccagcccagagtgacagggaccaaacctgggtccatgtgccgtgcccagcctggggttcaggtttcttccccgtgagctgagcagacagggagggtcttgggggaaggctgtgggcccttgggtggaagagtcttgggtgaggcccctgaactggtaagcggggcagcggcggcagggggcccagggaagtggggccagtcgggggtcctcaggggtccttcagggatatacctgctgtcagggtgtggggagtgggaagtgggggacggggtggattccaggattccgggttgtgcttggtcagagtggggaactggacgctccgtccctggctcagcctctcccggctgtgaccttgggggaccattgactttactgtgtgcctggagagcctaatccctacctgccagtgggtgacacagaaggcaggaatgcagaaggcctttcagaagttctcactggcctgcaaggtagaggctgttttctgctgaggatacatttgccccctctatcccccagatcggcggctgctcaaggagcctggtacagctgcacggaggcgcagcacccacaggacaagtggtggaatgttctggttgtccttggtgcaggtggcgggcggggctggggggctctgtagccttcctggcttcggtcccctggacaggctccacctccctcttatcgtggcccctttggcaggctgcctgccacctcaaagtcacgctgccctgggcaccctgcctcttccggggactggggctggggctggggcagctgtgtttatgggtgtactccctgtgctgggcactgcgctgagctcaacacacaggggctcggggaggtctgtgggtgcccaggccgagatgtgaaccctgagtttgtgcaactcgagtttcagagtggcggcctctgctcctcacaagacattgccctgcgagggggtcagccctgaagccggatggcccggcccccgctaccacgtggaggctccctgtaggtgcttgtgtagatgcccccgtgcggggacttgtttggctgatggatcagggggaaggttctccccacggtgtgaggcagcaccgagggctccgtgcccagcaggctcactgtcggcagttgggtctggtttgataaccgtggaccggggtgacaggccctgactctgcagagcaggactgtggaaaatggacactgatgctgcccggtggatccaggcagggccgggatgtttgcaggacccacgggacaattagaacgactgggcctgactggcacagggatgtggactacggtgcttgccatcagcagatacaagctgtacgcagtgggccgcaggcgctccctgggccggaacacatggacgtccaggtgtggaatggcccggacagcagataacaagccttcgtcgtggtcacccctgggtgtgggctgtgggttttaatcttttcatttttgctcatctgaattttctaattaaaaatatattgctttttaaaaataataaaagatcatt

SEQ ID NO: 14 - DNA, 2473 bp, Homo Sapiens
ggacatccctgcgcgtgcacgaacgcatttgcacgcgcgctagtccttcagtgcgggtgcacccttcccacctcctcaggcatgcgctgcgggggaagggccggctcaaaggcatgagttagaggaaggactgtatgccgtgaaggtctcctccaccccacgctgggtccctgcatctgtgcctcagttttcctgccgaatctatcaatgagatgtctctcttgcagggatcggcttcgtcactgagacctcaggcctctgccagccactccccctccccatacccctagtcatcctcggcaggtctcagtcccggctccatctgtgccctcgccccagccgcagctatgttgcacaccgagggccacgctcttcttcgggcggtgggtcagggtaagctacgcttggcccgtttgcttctggagggaggcgcctacgtgaatgagggtgatgcgcagggggagactgcgctaatggcagcctgtcgggcccgctacgacgacccccagaacaaggcacgcatggtacgctacctcctggagcaaggcgcggaccccaatatcgcagaccgattagggcgcacggcgctcatgcacgcttgcgccgggggtgggggcgccgcggtggcctcgctgctccttgcccacggcgcagacccctcagtccgagatcacgcgggcgcctcggctcttgtccacgccctggaccgcggggaccgcgagacccttgccacactgctggacgcctgcaaggccaagggtacggaggtcatcatcatcaccaccgatacctcgccctcaggcaccaagaagacccggcagtatctcaattctccaccatccccaggggtggaggaccctgctcccgcctctcctagcccggggttctgcacgtcgccttcggaaatccaactgcagaccgctggaggaggagggcgtgggatgttatcccctcgcgcccaggaagaagaggagaagcgggacgtatttgaattccctcttcctaagccccccgatgacccatccccttccgagccgctccccaaaccaccacgccatcccccaaaaccactcaaaaggctcaactccgagccctggggcctagtggcccctcctcaaccagtcccacccactgaagggagaccggggatcgagcgcttgactgccgaattcaatggcctgaccctgaccggtcgaccccgtctttcccgacgtcacagcaccgaaggccctgaggacccgcccccatgggcggagaaagtgactagcgggggtcctctctctcgccgaaacacagcaccagaagctcaggagtctggtcccccttcagggctgaggcagaaactgagccgcatggagccagtggagctggacacccctggacacctttgccctgactcgcctgagtccagccgcctgtccctggagcgccgccgatacagcgcctccccgttgaccctccctccagccggctcggctccctctccgcgccagtcccaggagagtctgccaggggcagtatctccgctaagcggaaggaggcggagtccggggctgctggagcggaggggctcggggacgttgctcctggaccacatctcgcaaacgcggccgggtttcctaccccctctcaacgtcagtccccaccctcccatccctgacattcgcccacaacccggaggtcgggcgccttcgttgcctgcccctccttatgccggggcgccaggctctcccaggaccaagcgcaaattggtgagacgccactccatgcagactgagcagatccgcctgctggggggcttccagagtctaggtgggcctggggagccagggcgctgagaggagtgagaggagccaaggagggtggggattaggaccttaatgggataggtgggagaaccagctcacacacacaccacgaacaaagggatctcttgcatgtgctcatgggtgcacagtgcacccacacatggttaaacatgtgtccataagcacagtactcttattagcaagaaagaataagtactctatttactgggtatatacacacatgtattcatgccctggtcatttcacatgcatatgggattacttgtgtacctacaggcacagcatatcaataaacacacagggctagggtcccaaactctcttgcatttgttcagaagcagtagggaacccttacttatgggcagtctccgatgtctttgccctcctgcagaagcaatcccttgctttccatgtatgccctgaaacacagcctatcatgattttgcacactctctccgtggacatcccagcccattctgcaggtcttgcttctttctccaggcctggctccttattcacaccctgcttctaaccccaaccacttttcaggatatctttttcactcttcttgggggttcctgcagcaacccccagcctcagttctgctgctgtctttactgctctcaacttcacttctcaacttc

SEQ ID NO: 15 - DNA, 2425 bp, Homo Sapiens
gttcagctggaactagttaatctgtaaacatagtttccatttcaaaaattgtgaaatgatgcctttttaaatggaaaaagcattaaggagaagaaaactgattcagttacagggtctttgggggaaaatttctagcaccaccctctctcctaattacagtaaaacatggtgggatataagaaccaaatatttattgagtattttctctgcgcctatcacaactctattttaactcctgtaaatgtgactgtgactccgtgagctagattatagaattcctgttgacagttataattggtaggcacagaaagcgtaaagatggagtttggaatggaatctggcctgtctgactctaagccctggatccactgtaatacattataactgctagctttgcaaaatgcctttttccttttctcatctattttcacactcaaactaaaatttagtaaactaaattctgagcagcagaaaaaattttagtaaaggtcctctcatccttgaagaacttcttatataaggatactccttcttgctccctttcccacgcagaactttaccaaaggtcagtaagaatgggctgttgtgttttctctcaaatcctatacagaagtccttaattccgaggtaaacatctgaatggaacaaatgagtatgatctgggggttaaggcaattttcaagtgtgtgtatgtgtgtgtctgttttaaggcataacaaagtccagagattaaggccgagttaaaaaacaaatgaggacaaaccaatgaggacaaaccagtccgctgaggtgcggccagagcagcagcaactgtggctgctttcttgataaaggctgtgaagacggcacgttttactcttattcgtgtatttcttttgacactttacccctctatgaagcctcagaggtgttttaaaattgtgttaggaaacacacagagataagaaaaggcaaatggtcctgatctagtgtctcagggaagaggctggaaaggaaacgcggcgcgagtggggtgggagagggggcctgtggttttgcttctgtccgggctgaagactgagtaaggtagggcccctccttctgcggatgggtttctctctcattccaccctccacccacctccggttccgcgtgcacgcgcgagatagtccagtgggcccacagataacgaccatcagagattaaagaaggaaagtcagcgagcttgaacacaggcgtcccgtgtggaaatgtccaaggagaccgccagaagtgcgcaagccggagtcggctagagtttccttctcaccgagagggggagcccggcgttcccggccgggagcgacccggagtccccagccccgcgtcccagctgccgccagcgccagttttggattcggcggattaggaagaggagggaggggggagagagcgcgaagagggaggggaccgaagctggagggtcccgagtccagcgccgtgttggcgtagagaaactttccctctcggcctcggagacggcgccccggccgtgccggagtggagatcgccaggctcggaggaaccggcagctctccacgcccctgcccgaagcctgacccgactgcctctctcagtgaggtacggagatttatctaggctcttccctggctgcgaacccaggctccctccaggtagcgtggaatcgcttagaagctgatatcccgaggggcggtgggggtggacagctccggccaccagtgcccgggaaggagggcgcggggctgcgcgtagccgctggccagcaggttgtaaaaaattaggacagctaaatgctcagggagtcgtccagcactaaaggaggctaagacctgttgacgcctgctatggcagcgcttgagaaatgactgggggagtccagcgaggtcggggacgcagcggtctccgggctccagaaacctccttagccttttgtggtaactttggtccggcggcggggggccggtgagcaggaactggagggaggcggtggggaaaccgtggatccgtccggctgagggtgcgtggatcagactgggctgagcaggcaagtcatcgtcgggtcacagcgaggcgacccaggagcgaacttccagggcagcctcccttttgttggcgctgggagagaatgtgggcatgggggtggggaggcgcgaagctccgaggccgggccgcggatactttaaagctcagagctgggagggcccaaaggaaggggcggcgtccacatggttacccttctgctgcgcgggtcaagtagcttcttctggagggcgcaaggcgcggcgggggtgatgagcccttgggttctcgctccgactgctaaattcgcttggccgggtccaccttctcgtggcctcactcgccacacggatcagaatccggagcaggcagttctctctattctgaggctcctgcggctgccgcg

SEQ ID NO: 16 - DNA, 2821 bp, Homo Sapiens
cctaggggacaatacccaggcatgttaacggagtttaaaatgccaaggaaattacaccacaattctgcccagtatactacaggctgtcaaaccgaaatgctatgccagctaggagtgcagcaactcccatcctctggccctatttaattaggaagcttcagcagagcgaagcctgccaagcgttcgccgtcagaatctgaaggaacccgagcgagcaagaagagtgcctgacccactccacagaagcctgtccagaaatggaggagtcagcgcccactgaagtcggttccgccctcggctcgcctacatggagcctgaccagcctcagtcatgcccactccggcctgggagacccgcaaagtgttctttttctcaactcccctgtactaccttgaagcttagggaagcaaagagaggggcatatctggactgcaaaaccaatgtcttttgccgcctaggagagaagggaatgagagagagagagagatagatagatagagagagagagagagagagagagagagagagagagagagagagagaaattctattgaaacccagctcctctagaatctgtgtgacctggtcttcaacgggagaccagtgcgacctcatggcacctttgccaggaatcagcgattcccctgcagtcaccatttgatttattgctttctcgctcattctttctcataaagttatttcttcctcatcctagtaagacttttttctttaatgatgacaaagcttctgtttcagtgtttcccctaggattggtgctctttcaaaacagtgaacccagaaaaccatcccgtttaatatttctcaaaatcctcgcagctccaatgtaagcgcaagcatgcaaaggtttcctgctacacctgcactttctgcccatcccagaaccacccctcacccccgggcctgcaacagttccccttgtttctctggatagaggtgggtggtattaggggtctagggcagtaggaggtgaggggctgaggaggcgcgctagggtaggctggtctgtgctggatacgcgtgttcttctgcggagttaaagggtcggggacgggggttctggacttaccagagcaattccagccggtgggcgtttggcagtcacttaaggaggtagggaaagcagcgagcttcaccgggcgggctacgatgagtagcatgacgggcagcagcagcagccagcaaaagccctcgcaaagtgtccagctgctgcactgccgcggggactcccacagcaccatgactagttcgtgcaactctgcagcagcaaacggcttccgaggaacacaggatcgcgggggccgggcagcgggctactgagcatcccgcggacggcggcagcagaggcggcggcggtggcagtggcacccggcggggaagcagcagccaaacccgcgcatgatctcgagagtttcagcaacatccagggactgggctcagccccggagcgagagggtcgtccgctgagaagctgcgccggagacgcgggaagctgctgccataaggagggagctctgggaagccggaggacaggaggagacgggagtccaggggcagacgagtggagcccgaggaggcagggtggagggagagtcaaggcgccccgcagcccggcagccgcctctcgagctctgccgcccgcatccctctggcgtttgggaagcagcaggtcctcagcccgcccggggtcacgtgggaagaggcagtcgggctctgattggtggagcaggatgcaggtcccgggagggaggggtcgacgaggaggtgcaaggatgcaaggaggaggcggccgcggaagccacagatgggctcgctcgccaggcgctggcccgagtggggctaggcggggatggctcaaatgagaagctcgggcttcagggtgggctacccgcacactcatataccattcgcctcactctccgctccaggacgccccctaccgaaggcggggtccggactagcgcccctcttccgcgcgtgaccccgggccgcgagtgcgggccgcggctgggtggcgtctctccgagctggagatggtgggggcggaggtgtcagaggagcagcagcagcagggcagagaggggcgagtcggcgcgggagagggcgtcctgctggcgaccggcgctccagcgtgcgggagcgcgccgcctaggctgtagggggatgcaggctgggaatgtcgcggcggagaggccagggacgtttctctagggatttacaggaaagagggtgagaggcgatggtgttagaaccgctcttgccgacctggaagcaacagcagcatctcccacaagagcgtgcaaccccaaggctgctcgccgaggcagctcagccatcccggcaggcgctctccttccttctctcttctcccctctctcctcccaggccccccgcagctccgacccagcccaagcgttcgcaggtttgaatccctctcctcatcacccgctcctctccagcccgtagcctattagtgtgtccacctgggaggtgcggtcagatgtgtttggaaggtcagattggtcgggacaagtggtctgagagaaagagaaaggctcctctgcatacgccgcgggtgggttgccgggagcatcggccgggcagcggcgtccgggaaggggagagcgggctccatttgttggcccaggcagtgaccctgcgttccttactcgggtctttgccggatggccggtgacctggggcgacgagagaaggtctaactcggcaggagtctctggctctgcgcgtttctttcattctctccagcgggaagggcaaacggcatagcgggacccgccttccg

SEQ ID NO: 17 - DNA, 3190 bp, Homo Sapiens
gggctggcgggcactgagctggggccatcacgcctttctagagcgcctgcggaggtggcgaaggcttggagagcatacgaggcggaatccggatcgagtgagttccttgagccgcttgcgtgggacgcagggagagggcgaataacgccctcaggcgctgaatgcaggggcaaggagccagcgagggtggctggagcaggccttgccagctgttaccaagtctctccacaggcttgggggcttggggcctcctggaaagatccctccgccgcgctgaccagtacggggctcgctcccgcactttgaaggctgccgcggtctttcgtcatttataatcaagcccaagatcaaggttgcaagctgaggtcggggtactgacaacgggaatgaagccataggggaagaggataactgggacgggctggacccatacttgatacccgggaaactcctagagcgtgtggtgctcctgccagcggcagttactggtggagctgaggccaccgctactgtcgtcgttggcgctttgcttctggaacctcccagcaagatggcactcactgtctgttcccttccgattagcacccccagccgcgctccctcctccccgggatacgtattagtcacatactgtggggagaagatgggctatgtaaatgtaagtcaacgcgctttcccagccacctttgcataatgcaacaggaacagcgacccgcgcgcacgaaccgggtagtgtgcgcgtgtgtgtgctcgcgtgtgtgagcgcgtgtgccagcgtgcgtctccgcgcgggcgtgcgtctgggtggatccttgcgtggcttgggaggcaaatcgggcgtttctccaagtcgtcttaacatgatttaggctctcaaatacgtgaaagcggtagacacaacagggatgcgaaggaaataaaaaacaattggggaagtggtgccaagtcactcaggctttgaactgaggacgagtagtgcggtcgcgcctggggcgcgtccggaaatcatcctcagcctgtggcggccactgccccacttaaactcttctgcggggagagttgagcggatccctggggggttggtcctgggctagttttaaactctccggttgcatctcgcgtggccccaccgacggcgcgtctcggcgtagctcttggcgcgggctcgttctccctcttctgttcagattcagcctcaccggacttgttacaacatgacagcaacttactggaggcaggaagagcagcacgaaataagatgagaaaaccaaaaacatctcctccttcctaaatagagacgtgcacctagctttttttacttgtttgtttgttttttacattaccctttaacctttggaaagagactgcgaagtggaaacgttgcctgtacagaaatcaggcttcttagctgtcaagactgtttcctaatctttaggctgaatctttctttgtccgctgcaatctatggggaaatttaacaacgctcttgccagaagcagccaggttgaaggaagaaagtgggggtgtttaaattaatcctattaaattttggattactcccccagttaaagtcatttaaggtggtccaggatgagggaactagtgatggggtgaggagtggggggcacatcaccaaggttgcctgcatttgaaataacgccattttggttgagaggtttgctgtattttaccctctaatctcacatttcgatcatttctcagtgtctaagtaatagatcctccctcttggcagtacaccattaagcaggtatggggaattctcctttcagggttcagatggtgacattatccctaaggactggtggtaggaacggcatgtgccgggtagatagagagaaggtcagggtggcatctgccgggttagccaggcgctcttcaactcttttcagagaggacagggttaaaagccaagtctgactttgcctcttggaaatcactgggtagcagccgcgcctcccaagcattctttaaaccagaaaagtaggagggactccgggagagagggagggaatgagggagggagagaaagagggctccaggagcggagcgcgccagagcgcgagggacggagggagaggaggagcgcgggagctgcggaggcgatcccgcgaattcattactgtaaacatatccgggggtgtcaggaggggtaggggtgggggccgcggcgcctacattagcccggccgcgtcggattgaggcagtagtgtggtctgagcagcctccagacccacgccgggcgggcgcagcacttggagcgagccctgcgcccgcccccgcgcagcgccgcacgcccggctccgagctgtccgcacacacgcgtcggaggagagcccgcctagctctcccgccgagtcccgggatcctccaaatccgaggagctccggcgccgcggggcagctttctgccgccttccccgctcgctgtacttcttttggggttcgttggcttggcgaagcggagagggggaggcggaggaggagagaaggcgggggtcgcggcggccgaagccaagagaaagtggcatgcccgaaccctggaggcggtggtggcggaggacgggggaagacgatgccgcagctccgtaggggacgtaggcgagagcaagcgaggcgagctgggcgccccggccccggcccgctgcggggaggcgcgcgccgctctgaggctccggcctccgcacccccgcgccccgacgctgcgggcgacagggcttggctccagcagccgccgccgtcgccgccgccgccacccggaggacccagcaaaagtttggatctgggggagggcgcggcgctgagcgggattaccaccagggctggaaggagacctcgagaacctttgcaggtaacgcgcgcccccaaccctcttcttccatgccccgccgctgcgctcccgcttcctcccagagcccttcctggccctcgcgggtctggcagaaagtaagagggaggcgaagttcaagatcccggggatgagcaccgagcgctggcagatcactagtcacgttagaggggcagctgtgctgagaggcaaattcccccaggagtgggtgagaaccctcagccccagctggtgcctcatcttgtagctctttggaaatttggaacgtgaatccaggggcttttagtattcttcagtccagagaaatggttcatggatttcactt

SEQ ID NO: 18 - DNA, 2308 bp, Homo Sapiens
taagggctaagcaatgatgcataaacggggtccactgcccaaacttacagaaagcaaaacgtggaaaattagtaactttaactgatagtgtacacctaaagaacctacaccggccgggcgcggtggctcacgcctgtaatcccagcactttgggaggccgaggcgggaggatcatttgaggtcaagagatcgagaccagcctgaccaacatggtgaaaccccgtccctactgaaaacacaaaaaaattagccaggcgtggtggcacatgcctgtagtttcagctactcgggagggtgaggcaggagaactgcttgaacccaggagacagaggttgcagtgagccgagatcgcgccactgcactcgtctgggagacagagcgagactccgtctcaaaacaaaaaacaaacaaaaagaacccacccaacagaattaagtaccaacataataaatacgaagaattttagattcttggtttttaaaaaacatacaaagatgatattccttcaaaatatctttacaaaacatattgagactgtgatgctttatattgattgtatgaaaacaatgaaaaagaaccagcactgtttcactataaaagctttactaatgtaaatttataaatcctttcttaaatattttgagttaattctaattttatgatagaaattcattattttcagcaaaaacagctggcatttgggaaaccaaaggctcaaaaactaagaatagtaaccaaagaaacttgacaaaacagtccttttaaaactctcatctacactataaggggaaactttgatcacgtcccttctccttcatcaatcgtagaactcaacattaaggactacacaatcccacatccctctccgagaaaaagcaaaggctttgtgttgtagcaacaacgcaagacatggagggaagctccactcaagacttccctgcctgctccttccccaaagccactccagaataccagggagggttgagaggtaaggcatgaagggcgcaatatccaatatgagcaacgcgtgtgatgcatctggtcaaaatgcatacagaggacttgtctctgtccctagatagaagtcctccgtcctgcagtcatgagggtcaattgctgaggcttcacagttcccttctctcttacactcggaccgtcacgctcctcacctactaccccgatgcagaggtagactcaggatccctgcacttgtcaaggattcctcggcaagctcacggggcgggagtggccacaagacggagctcgcctggtcctggccttcccggcctatacaagcctgcccccttcccaattcccaatctccacagccttccatcctcccactttcgattcaccttgcgccaccgacgcccctggccttcgtttgcagcaagtttacccccaccattacctctcgcataaaagcctgcatttaccaggtcaaagaggggaaccaacgcctgcaggaatcgcttcaccgaatcgcctggccgcgtcctctgctagacttcacctgccgctgcggaccgtacacaaccactcccggcatgccccgcgcacgcactacctctcccaccccgcccctctcccgcccaaacacgtgacctcctttcgtctccgtccacgcccacttccgttcctccactttcccttaggaaggaggagggagctgggggtgttaaaagcgtagcgacttcctcctcctccccgcccccgctcctgtacctcccgctacaatgtcttccgggtcgctagcgcctcgacgccttctgggaaaatagctcatttcctcccctccccctcctcctgccttcaaccaaccagccacccgtcagagagggacatgcgcagtgagtgcctcccgtctcttctacccgaaccccccctcccccccaagcagagagaccccagcagcagcagcagctgatgatgaagagagaggcagtggcagagggggggcaccttttatttctatttttaaagggacaggacactaattctaccccacttcaaccttgaattcaggggggtggggggaaggcggctgagttccttcccccaccctccagccctgagccctgagagggggattgagcctgagagaggagaaggagtttcttcttcttcgaaaacccccatccacgactcctaccccctcacccctccaactcgcctccctccctccaccctcctcctctttggccgtgagaggaggagagaaagaaaccaaaagcctcttagcaacacagaccctttgctgctgctgttgctgctgctgctgctgttgctgctgctgctgctactgctg

SEQ ID NO: 19 - DNA, 2441 bp, Homo Sapiens
ctgacatggtcttgatgctagaggagaaacatggcttgggggtccctgtcaacccaggccctctaggcccctaccatcgtggggctcctggcaccacgctctccagcacttttgatgttggctttgattcggaaacgctgcgtgtgctcaggtttttggtggagagagaagcagcccctgagggatttgcctctgagagggtttcacctagggagtgatcgatgctcaggcgtggctaggtttattgtcccttgtttttgcccctccctgtttgtgttctggtggctgaggatccagtaggtccctccatgtttgtccctcttatgctgagtgagctgggcggccggggtccgaggtgtgaccaggcagctctgacctccacatgccccagaagggctggcacccagccagggagccgccgtcctctctgcatggagcaaaagcaaacgctcctcctcacctgccaggttcctgttggagccccttccacgtagtgacagaaagagccaccgtgggtgttctctccagcgagtgcctaaagatgatggtggggtgggtgggtctggggctgactcttctccccagccctcttgaggggttcatggttggtgataagtgagcggcggtgcctgggcaccggctggctgggggactttgaccagtgtggcttcaggatctccaccctgcacccagcctgcattaggcagcgttcagctgccctcacgtccaccttggccaaatctgttgccccaggtgacccagactgcggggggacaggcaatggggatgagattgggctccacagcctccccactgcagcagcacagctcccgggagctgccgagacgcacacatggcccacccagacccgagtcaaccctcacttaggacagtcccgagattcacgtcccccggaagcttgtgaagttctgcgccacggtgtggcaagaggacagccagtcagacctgtccagcccactccagggccgcgtgggggtggtagttgtaaaacatatgatttttatcttgacagtgtccctttaaaaaatcaaagccgcaccccgcctccctggccagcaagaaacctaaaagggaaacagtaagtgtctggtcctccggctacgtttttttgcccccgccctcatttttaaacccacgacaagtaggggagatcgtttccgccccaggctagtgtctgattcatataacccgtcagctccacttgcccagtcccggcctccctgcccagggagtttgtggaaccggaaaagctctcggtccgtgggcgaaacgccaggtgcgctggccccgccgccctcccctcagctttgcctccgccccgcgtggcccccgtgccgtttcccttttttttcttgctggcagtggaatggacgttgcaggcggaactaacgtcgctgctgcgttttgcaatcgcgccccgcgcatgcttcttggccccgtgtcccgctcctttaccctgcgggttcgagctccttgggctgagctttttggtttccttgggcttcccttgtgccccagggagcaggcagggggaccagcacacaaccacctggagcctccgtggcccaggcagacccagccgaaaccctgtgtgcgttggtgtagaaggtggaggccactccggagccacccggaccgtgttttcctttctagaggggtgaggggattctgtgtggttatttacccttaacttggaggcaggtatgggagcaaatgtggggtacacagaggtccagaaaagcatcccgggctcattgcccgggccgtgcccgctcccccatttctcccccacctccccgtggtctccaggcatcccgcacccatctcactttccccttccttccaggagctcggtcaggcaggccggggtctcccgaaaggagcactgacgagcgttgtgcccctcaacctggttttgtggggacagagcaggggcccccgcagtctgacttccgttccccagaacctgggcattttccttcttcctcagccttgttgattctgtctgctcccagtgagggaagaacagtggctcttagccagggtgcccgttagaaccacctggagcaggtcagcccccagaggcccgggcagggcacagctcccaacagctcagctctccctggtccaggacgcccctgaccgtgtctctcgcctctggcatggctttgctctgcccccgctcccagctcctgtctgtcactaacccttcactctccacctggggccaggcgggactgaaagccagggaggggctggttgaggccagggctggggcggttcttggcagatgccctcgtgcccgtcatcccaggcaccagcgtgggcatttgggcatccagccccgtgctggagctgatggctgaggcagggagggcatcggtgctgccagggagctcttggccaccctctgagggtgg

SEQ ID NO: 20 - DNA, 2818 bp, Homo Sapiens
gaggtgggggcgtcaacgacaggcgctcagtaagtgctcctgaggcaactgccgggctgtcctggacctggtgaatcctttcggggttcagcaaaggcggacgctgaccgggccaaggagtgggacctgcagtgctggaccacccttttccaagcgcagaagtgccgtgcccgccggctctcaacagggcaagaggcccctctcgccgtgcagagcgcagcgcttgcggcggggacagcagaggcgggacgggcgtcacggagttcccgggtcctcgcgcggtcacttacctggcctcagctatccgctgaaaaaggggcggacggcctcccgggatccgagccgatatcgcgcgcggcgccgcggggcaacctgaagccgtgtgcgtgcgtgtgcgttcacgcaggggctcacccagcggccacgggcttctgaagacccgggtgggaagtgcggcccgggaaagcgcaagcgtctccatggcaacgagggcggacggcgtcagagcgagtcgcttccggaagtgacgtgcggaaggggtgcccgggacgaagccatggccctggaggcggcgggagggccgccggaggaaacgctgtcactgtggaaacggtaatgctgtcaggcgacgcgcaggaggcgggggccgaggccgggcggcccttcgcggaccctccgagctcatagtcttcaggctgtggaatcggagctgccaccgcccgagactccaaagcaaagcccagtttccggcgcggaagcggagggatctcaggaattgtagtccgcggggtgggcgcggttctcgcttccggccagtttgtctggcctgcgcttgcgcgggtctccgccgcctgggctcctagggactgtggcctcggcggtatgtcccttgctttcccttgaagcgggagaagacccggcagaggcgctctgtccgctgcagccgcgcgggtggaggaggcagagtctgaggtgtgaccccgaccaagtttgacgcttctgtcctcctagggagcaagctcggctgaaggcccacgtcgtagaccgggacaccgaggcgtggcagcgagaccccgccttctcgggtctgcagagggtcgggggcgttgacgtgtccttcgtgaaaggggacagtgtccgcgcttgtgcttccctggtggtgctcagcttccctgagctcgaggtaacctgggaggacgccgagctcgaggcgggcccctcggtgggctcgggcgtgcggtctccgggacagggagcagtgcaagcgtagaacccggcttctcgttttgtaggatgtcattaatagtctggggagttggccgggcgcggtggctcacgcctgcaatcccagcactttgggaggctgaggcgggggaatcacctgaggtcgggagttcgagaccagcctgaccaacatggagaaacccggtctctactaaaaatacaaaattagacgggtgtggtggcatatacctgtaatcccagctactcggaaggctgaggcgggagaatcgcttgaacccgggaggcggaggttgcggtgagccaacatcacgccattgcactccagcctcggcaacaagagcgaaactccatctcaaaaaaaaaaaaaaaaaaaaaaagtctggggagtcttggaagggaaaaaaaggcaaaaattaagggaattctgtgactattaagaatcagctcatgagctttatcttcaagtctgattgttatcttgggttcttcatctcagtgacctgtccaccacgctcccagttgcccaagctggagatctgcatcctcctgggcccctccgttcctctcgcgtccagttgcacactagctcgcttttattctgcctcttaaatgtcgctggaatctgtccccttgtctgtttcccctctgctccttccctggctgtgccaccatcactcctgtgggttcctgagcagcattttcatgggtgccctggctcaaatgttcctcctcagtggtttcttttccatactgccagcagaccaattttcctaaaaagcaagtattttcctcaaaagcaacaagtcccctccctccctccctccctcccttccttccttccttccttcctcccttccttcctctctctgtctctctttccttcctttccccttcccccactctgtgcccaggctgaagtgcagtggcataatcttggctcactgtcaagatctgatctcaacctcctggactcaagtgatcctcccaccttagcctgagtagctaggaccacaggtgtgagccactacacccggcttatttttttattttttgtagagacaggatctcactatgttgcccagggtggtctccagctcctgggctcaagggatcctcctaccttggcctccccaagtgctgagattacaggtgggaaccaccacacccagcccacaagtcctcttagaacattgaagtgcccttctcatgacctcatggtgaataaagttcactctggttggcatggcttcaaggcccgtcatgacctgtcccctgcgtaatttaatatgacgctggaggctcagccctcaccactattctcagttcttcccacctcctacagcccactgtgagtccctcacgtgtttgctacgctgtatttggcggcctgacctttgcagtaatgtttcttctggaagggtttccatctggctaactactactcatctctttgggctcagtttagacatgacgtcctccactaagctccctctcatcccacaagacgaggacttgtccctcagcaccatgtcttagtccgtttgggctgctgtaatagaataccttagactgg

SEQ ID NO: 21 - DNA, 2368 bp, Homo Sapiens
aatgcgcatatcttatttgtatcttgattcaaacaaactgttaaaaaaaactataatacaattgggtatttgaacacagattagacataaaatgatattaaggaattgtgaattattaaatgtgacaacagtattgtggttatatgctaaaaagaagaaaacccttatcttgtagatacatactttgaaatatttatgcctaaagtgatattatgtctagaatttgcttcagaaataattttaaggttgggaagcgggtaagataaagacgaaataagattggccatgagttgttaactgtggaatctgagtgaggactagtacatggggtttgcattatactattccatttttccaaatgttcgaaattttccattaaagttaagataaagttaaactataaagactgtttcttaaacaaaaaaggggccgggcgctcacgcctgtaatcccagcactttgggaggccgaggcgggcggatcacgaggtcaggaaatccagaccatcctggctaacacggtgaaaccccgtctctactaaaaatacaaaaaattagccgggcgtggtggcgggcgcctgtagtcccagctactcgggaggctgaggcaggagaatggcgtgagcccgggaggcggagcttgcagtgagccgagatcgcgccactgcactccagcctgggcgacagagcgagactctgccccaccccccaaaaaaaggaacagaacagaaaggtattaagaagaattagaaaaaaaatccactgtccttgactcatttcctgtccccccccaaacgttctggtgtggagaaaaggatgagcattggtaacaagtaccacagtttgccattggggtgggcgggactgatgctctctttatttaaatttttgacatcttgctcatcataaattttcttgcaataattgttttttaaaatgttgcattaaaatgttatttttcttgactgctgaggaattttgcacccctttaaattctgcgcccgcgtcctggttgggagatgtggggaaaatcctgggagcccaggacagggagaggcaagtccccacagaagtgggaatggccaacagctccctgagaagacagcttccctcttggggaggcagaggaagtcccaagaatacacaaagacaggagagtggaagggccggccagtctggagatactaaaagagactccggatgaggataggggctgacccgaaagccccgcctgactccgggctgcaggagggggcgtgggacgggggcggagccgttggcgatgacaacagccccacgtgaccggccaacactgagtgttgtctcgctctggcgtcagagccgtcgtggctcgttccattctcggcggtggtacctgctcccggtggccctgaggacgtgtgggccaggggcggccccgaaattaggaagcggagggggagcaggtaaggaacccggcggggggtccctggggttggtgtgagggagtggctccggcctgcggatgcccaccccgggggagccgtgcggagaagcaatcggtccgcgatgcagcccccgggccccgcggcgggcccgcgagccttccttgagcggagaggtgcccggcccggagggagccggcggtcctggggctacgacccttcggaaacacctgcctacgccatcagcgcaagcttttccgacacccctgccccgcacttcttggtgcagaaaatggtggtcagcttgcggggcggggcggctgaggcggggggcgagggtggcgaggagggccagggccagggccagggccagggcctcggggcggggcgggggaggggccggatggcggtagttcctagctagcgttctgctgcagcagcccccacttcccccaccccggcagtctgcaggtctgcggggctaagtgtcgcggcggcgcacctcgcgtcaagaatccggaggaggagactgcaaggataggcccaggtcggtgcgagggtcggtggtgaggcgggggccggaacgtgaggaaagcccagtctgagaccctaatccatgccttcaccctcgcccccctctaccccatgcaaccctccccttcccacacgccatcctcgtcctccattttgctgcctgcggaagcctggagatggatctacagggaaaatggtgggctttgcggaagggaggggctcggattgagggcaccccacagggcatactggcttctcaggtggaaaaaaatgaaatgttagagtataaagtcaagtccagggctctgaattttaaaaggtgcctagtagggcctctgtcctcagtgcttatcagtccaccaagaattcagcccattttctctctcttgtctcctaggagtaatggagtcc

SEQ ID NO: 22 - DNA, 2429 bp, Homo Sapiens
gtcgtcaaggctgtggcgtcacgcctctaagcggatacggcagaagttttggggccagacacaagacttccaagtttgaatgggcagcgcaaaacccagacaagttttccggtagtgccgccaacccctgtcaggcacagaagacacagcgagaaccgtgagccgttacgaaagcctaaaacactgagctcgcgtcctgccaagcagcaggcgcacaaacctacacctccgagcgctccctggaggtcccgcccactcttctctcccgagccggctagagatctggaagagggcgggccaagggtgaggagggcagtatgcgcatgcgcgctcaggacccagtcagtgagccaataaggaatctcgcgagtgttgaaagtcggtggcgtaggtcgtcgtcctggatgctggcgagatagatgttatcttccagaggaagaggaggaggcggcgaagcgttttcccagcctcagtctctctttcgttttccttttcccttcccccaaccctccgcccttctctaaatcagccggccttccttgacctcagtgacccgtctggccccgcccaccctcgtcgacgtgattcccgccgtgaggtaagcgccggtggaacctagagccccgcggaagagcagaacgtttgggagtgtgcagctcctgggcccggctcaggcccgtcgcggaggcgcggcgcaggggagcgctcgggtgggagtctcgctcctccaccagtttattgcgacgtagcatccaggcctaggcctccccgtccatccccgccggactcgggcctctggcagcagcgggtgacgcagacggaacatcatgtcgtccgcggccgagcctccgccacccccgcctcccgagagcgcgccttccaagcccgcagcctcgatcgccagcggcgggagcaacagcagcaacaaaggcggccccgaaggcgtcgcggcgcaggcggttgcgtctgcggccagcgctggtcccgcagacgccgagatggaggtgagggcgacttgcggcatggggagcgggtgcagcggggaggaggagctggctccctcgccggatcgtggcgatcggacgcagagccgggtttctctctctgcaccagactcagcttcacaccctgtggatacgaaatgatgctctcactcttgctcccttgttcttaccctattcgagctaagcaaaatggatttctggctcctcacatttaaattatttgtctctttcgtgaatcctgacaaatatttgaacgctctcagtgaacagatgttcttggttaccgtggcccgggggacccatcgtttttttcccactagactcccataattccctctcctacctctgaatgtggtttttagtttccaccaaacttcggggaagggcgaggagatgaccccttaggagcgggatgcacgggcggggtgaaggaggcatttaaaagcagcgcgtccgaggacttgggcctccttttcttcttcccggtccttgcaggggcggtatctgttgtgggcagaaacaatggcgagagctggatggccgagtgcgcagtggggataagcggggcgcagctgcttctgtgaagggagagaaggcccctcccaggcactattccactggaagggaagcaaccaaggcagcagcagctgtctcggatcccccgtctaatttaggggggatgaataagtgtaggaatgaattagagaaccaggcgcagttggttggctctcagtccggcacttttctctttttggcctctggccttaagaaaaaaaaaaattagtaccactcgctgccgagacttatgggtttgggttgggcaggggatgctgacagtactgagggggctggaaagatgggggaagctgccaggcgggtaaattggatatgcttccaggctttgcatctgggaacaaagtaattgctccttccaatttttattttcttggccttcgacctgttttgagatattttgtgagtcggagcccaaagatttctgggattttcctatccttagacagaatgaaagtaatactgctccgaagatgagtcttgatgcagaatcattatacagtaagaaaatggtagcgtaatttaccattgaggcttttggcacagtagttatatttgggtagctggggttaagtaacattaatgttagtaatcatttaaagaacttttagtggtgagggtaggtttagtgacataggaactcctgatagttcctgtagttttgagtgattaagataagattacttccaaattaaaatatattcagtgttgcttttttttccttaaggaaatggttcttttgggttactagggctctttaacttggatttctgttccaaggcttaaggggtttgacacaaagcaattatgtgtaaatgtgcagttctctacaaaaattgtttatagtttttc

SEQ ID NO: 23 - DNA, 2284 bp, Homo Sapiens
tgtggcattgctccctgtaccgtagggctccccgggaccgacagactttggataacagcagttgggaaacactctaaacatataatacatctccaactcccaaacactggagttgtggggtttttttttttttctcttcctttttttgggggttggaggcggaattctttggaaaattctggtattttgtttctccactaacctcaccctctgtggctgtttctattaagatatattttccccctgacaatctctccatattgcacctagtacaacagatgtacctgtggatccactgggcttttattgggttttgggaatactgatgttatttcacttaaaaactaatccaagcttaatgttttgatgaaaatgaaaatatatccacagggaagcaaatatccacagccacccagtcctctaaatgccacacacatctcattttatctaaagtgttttttcttcccttccaattacaaaataattcagtttactcctaggaagatcttcctattcactgtttttagtcatgctagcacatcttcggttttaaggatagagaacagttaggagttacagtattctgtttcccattctccgcatgtttctccccaaccctcacttttcctccctttcgtgttgtctcctctcctctccatgcaaagcagaacaagaagactgccttccacaaagacaataggcttttcccaactgtaaatgactacatcacaagccgcacctgtcagttaatcagtgcatttaagtctttgccagcggatgttgaaatgatgtctgcaataactgactgggtttctgcgagcccagggatgcagacccctccttcccccgccccccgtgcgagtttcagtcgctaatgaaaaccgtatgaaacagattccccttctgttatgtaaccggcttctccctcgcctttcggctgacttgggcacaatgtttctcatgagagtggagatgcctgcggcgacggcggagctggggaaggggacgcggggacccgagagcacggaacgcctcgcccaggtggacgccagctcctcgcctgcgagcagctcagcgcaccgcttacctggctgcggacggggtggcttcactcaatcatgatctcctctcttgaaacggagcaagactgaacaattcactacacgacggatggcgagggaaggaaatgcaaaaaagaaaaggaaaagaaaaaaactggaatcagatggtcaaatttcacatcagcaccgagaggctgttaggagactccattctgctcgcggctgctccggctccaggtccggcttcccggcgtccgcgggtctccacccctccgcccgcccagcctctccagccaggtgcggccgtctccggactggctccctctggccgagcgcggagagcagggctgggcgctggggccaagggaggggcggaggggcgcgcgtttgggcagggacgggggagggagactgggtggaatgaagtggggaaagataagagtggcagaagaaaaaaaaaatccccggttaggagaaaagtggtggaccacgcagagagacgtcatgaaatccgcagattcaatgaatgctactcaattccagccgactggctgagccccgctggcagcgcacgaagcgacgcggctccgagataaaagcgagtgcagcgccgcgtgctggggaaaaagccgcacagcgccggcgcggtccgggaggaaggggcgggggcgagcaggacagagccacagacccagagacgcccaccccgccgcccatgccagctagcgtgtcagcgcgtcgaggaccgggcttggtgggggcgggctgggcacaaaccaacgtgcatcccccgccactggaaacgtgggtgctccatgctgggggaatcttttgggtttcggtccccgaccccccagtcccaacctttctcccagtgccactaagtaagttattcccggagaaacgcctggaaagcaggaaagagccgaagctcggggagcagttttgtctgctggttgtaggggttcggcttttagggttttgtgagataaggaaaaagaggctctgggcactgcctcccaccgggctgaaatccgtgagaggcagccccggcgcgggagccggagcctgcaccgcccagagggggcgcagcgagcggccgggacggaggggaggggccctatccctgagctttgcttgcacctggtggcgccccagcctgctgccccattcagtcccttctgtcctgtccactgcaactgggacctggtcccggctgctgc

SEQ ID NO: 24 - DNA, 2290 bp, Homo Sapiens
aatgcagtaacattcgggtccactcagcaatacagtcaccatttatatatacccaaaggttactaagacaaggtagatgcaggacagcttttccacccgctcaccaaaatggaaactccaggtcagcttccacaagaaatgggaaattcaagcgactctggcgaaacgattcttgagaaaactcttcaagggcaacaaaacaatatttcaaacaaacagattttacttgagggaatggggacattacacagcaattgatattcgaatggttttaaatggactgattcgccgtaagttttgaggctgagctaaatttttatgaagaattattaggaatagggccactagaaaattaagttttaaaagcgcttttgtccttgccgaaggtattacattttggcacttctaagaaccgttctttgagggagggaataaaggagagtggacaactcgtagcaaatccttttcccatgttttcagaaaatgtagagacgataggacttgaaaatctttgtcataaagatggtctttaaaaatgcacacaattctaaatgaccatctgggcagctacaactgcatgctcatagctcgcatctagaggcatggttttacgctctggccctgaaggataacaaggaggcttttaaggaaatgccgtgagaaagactgctggctaagcattgtcacggccactggaggagcacctgccagtgaaccgacgctggctcccccagtctcaccagtgcacgcacactagtccgtgcaccccggccgccgctggcaggccctaccagccaagctggaggagcagctgccgcaaccacggcaagcgaactgaaatcccagagccggcctcgcccggcagagcgcccgcgcttcccgcgcagcgcacgcctcgcgcgcaaacccgagatgtgaccgcgagctgcgacctcgcgcggctgcgacgggcctcacctaacgcgcacgaggggatcatcattgctcctgccctgggcgcccgcggccctacaccacctccgcacacaacgcggccggtgttaagtctccaaacgccccgagagctccaaggaccgcgcgcgcgaaggcgccgtagcaagtgggcacacaccagacaccaccccggcgtgttccgcgggagaagccagtgcacacatcctcccgcaaggcggggttgccagtgcaacacaggaatcctgccctttttctagaaaagccccctcccccactttccctccaatacactcacctgcgtctcaacagtttccttcttgcgctacacgcggccgcacccgggcacgtccacgcccgtgcacgctgccaggcgcgactgtccccgctcggctcccgccgcccccaacctgcttgtgcccacgggaggggcggtgccacctcccgaggcgcccaattctctctactcccgccgcaacgggctgagctctaggaacttcgcgggcacaacctccgccgcccccaccagtgttcccgcccagagttcggactagggcgcaccacccctaccctgctagacgcagcgggggcgcgcacagaccttagcctcggcgtccaaaatggaccaggggcaaggcgcggacgccgtccccgcccccacgcccccagcacttgcctgctgtgactcgaagctgcagctactacggctcgtgccgctggccgtcagcactgccgcggaggagtcgctcggggcgagctccgcggagaggcggtggcggcggcggcggcgggaaaggggactggaagccggcggaacccccgccccacccgcgccgcgccgcgccgcgccggcaaccgccctcctcacccggccggctactgcctcagtgacgcccaggcgccgcggtcccgccgtttgtagcggggcgggaaggaggggcttgcttggaagagcgccaggaggcggggccggcggcgagttcgcggcgccgcggccgccgccggcgcgtgccctgcccgaccgcccttcgggtccgtgccggcagggagatgccgggcttcagcagctcagctccgtccctccggacttccgagtctcaccaggcttccccgacaaggtttctctggactcggtggagagcgttgagcgcccagaggaggctgattccaggtgcaagtttgcaaatcccgaggcccggggcgctaacggggagtcagagcagctaacgtgggggttactttatgtgttcataaatgtatttataaatatatataagtatacacacatatgtgtgtctcttttaaaaattctctttttccccctacttcgcagccaagg

SEQ ID NO: 25 - DNA, 17968 bp, Homo Sapiens
ggtctccggaggccgggattcgcggagggtccagcagcaggaagaaaccccaggaggaagaaacctcagacagatcgccggcgaggcagcgcgggatccagcctcaggcgtgcgcggacggtgtgcggagtgagtctccccaaaagtggagcccttgtgatgacgagcacaggtccgcctgcgtgcccgtgggctgctctctcaccggtggctctcagtcgcggagagcagaacccggcagcttcaggggctgcctgcgggagggtgttccctgctgtacgtgtgtgttcgtcatgggtgtgtgtgtgtgtgtgttgggggggtgcgtctgtgtgtgtgtctgtgtgtgtgcacgcgcagtgcctgtctgtgtgccgacttctgtctctctctcacgtctctctctctctctctctctctctctctctgtctcccttctcgctctttccgtggccctctctttctgtctctgtccgtctgtgtgtgcgtgcgcctcgggacacatgtgccctgtgcgccggagggtgggtttcttgcacgtcggcctttcttctggtcagcctctccccgcgtctctgcctgggtcgtgtggccggttggcagtcgtcgtcccggcggttccagtttgggggtctgtgaaggcctgggcaacgtgggcatcggcgtcggacccgcaggggttttcatcccctccccatccggagcagcctctttgctaggctggatccagacgagcgctccccaaccaaggacaacggcctcccaggcgctcatcgtccacccgcaggagggtgcccgcagagcttcaagaaggtggttgtcacgcctgtcgccctctgccctcatcgagaaatgtagccacagctcgacgcagggacggagaaggaagccggcaaggggatggggcaagcatgtctgtctctcaaaggctggccttcctggccgagtcacccgtttgacactcctccccggatgccggtggtggtggcatggcccccccgtatcctgcctgggctctggcctctgctctgacctccctcttgctgtgtctgccccgtctctgagaagcctggcggcttcttagtgtggctcagtgtcttccacaaagaagacttccccgtccatcagggagaaacctcgtggcggtccgcgtcatgattgtttccctctccacacctctttctggatgattgggcagctgtggtgatcctggagctctgggcttccatacctgtgtgggacagggaagctctctcggtctccatggcccaagtgatggctgcacgctcggtccaggaagaggcggaggcaagcccaccgctcctgacattggccttctaggaaaggcggtgttgcatcccacctgcacttcctctctgattcttgagggccaaccgcttcctccgctcctggggaaagtgccttctagcaccgaatcttttggctgccacggatgtcagggagccaacgggactgggttttggctgggtgcaggggaggttgcgtcaggggtacctagccggcggcgggctgggggtggggtgtactttgtccaaacctctcggctcctctggcgggcctccctgaacgtggcgtggactcgcgcacaggccctgtctcgcaggttttcaggtgcgcttggcttttcctccgctttgtggggcaggtctccagtggccccccgggcgcacgcctggacatcactgtccgtctcgtcgtcgccccctacggcctcaaagacacacgctgcctgcatgtgctcttgggggacgacagtgccacatgtggacacactggctccagctcggactcgcctctgtctctctttgcccgtgtcgccggaagccgcctcgggttgccggagccctcgggccttggagatgaaggcaggcccctgctcctgccaggaaggagggaggcagtgggctcatgggtcggtgcctttgcagccgacagcacgccttgcggccctggggatcttcctgtgccccggcgagaccctttccgcctcactgcattggaaccccattcccgatcacccgctgggatccatcatcggaccccaagaggagtccgcgcagcccagccggcaccccgaagctcctccttcagtgggaaccgaagcagaagagcgatcaaggaggtcctcaccacaggactcctatgggtccgaccatgggtctcccgcaggcccctctggcagtcctctccccacccgccgcctcgggctgcgccttcgccgccgccgccgcaacctccagcaccgccgccccaggccccgcagccgccgcgtcgccgccattttttaaagggtccgcagcctgactctgcggagtaagggggggtggagcgggggagtcggcctcgccagcgcgcatgcgcgaggcccgagccgccgcttgggtcacagtgaaagccaccgttgcccggggatgggtccctgacacttggggaagtaggagccctgtgtgatcgtgcgtctgagtctgggctgagaccagtcctggccagggcagttaccaggacggtctccggaggccgggattcgcggagggtccagcagcaggaagaaaccccaggaggaagaaacctcagacagatcgccggcgaggcagcgcgggatcccagcctcaggcgtgcgcggacggtgtgcgggtgagtctccccaaaagtggagcccttgtgatgacgagcacaggtccgcctgcgtgcccgtgggctgctctctcaccggtggctctcagtcgcggagagcagaacccggcagcttcaggggctgcctgcgggagggtgttccctgctgtacgtgtgtgttcgtcatgggtgtgtgtgtgtgtgtgttggggggggtgcgtctgtgtgtgtgtctgtgtgtgtgcgcgcgcagtgcctgtctgtgtgccgacttctgtctctctctcacgtctctctctctctctctctctctctctctctctctctgtctcccttctcgctctttccgtggccctctctttctgtctctgtccgtctgtgtgtgcgtgcgcctcgggacacatgtgccctgtgcgccggagggtgggtttcttgcacgtcggcctttcttctggtcagcctctccccgcgtctctgcctgggtcgtgtggccggttggcagtcgtcgtcccggcggttccagtttgggggtctgtgaaggcctgggcaacgtgggcatcggcgtcggacccgcaggggttttcatcccctccccatccggagcagcctctttgctaggctggatccagacgagcgctccccaaccaaggacaacggcctcccaggcgctcatcgtccacccgcaggagggtgcccgcagagcttcaagaaggtggttgtcacgcctgtcgccctctgccctcatcgagaaatgtagccacagctcgacgcagggacggagaaggaagccggcaaggggatggggcaagcatgtctgtctctcaaaggctggccttcctggccgagtcacccgtttgacactcctccccggatgccggtggtggtggcatggcccccccgtatcctgcctgggctctggcctctgctctgacctccctcttgctgtgtctgccccgtctctgagaagcctggcggcttcttagtgtggctcagtgtcttccacaaagaagacttccccgtccatcagggagaaacctcgtggcggtccgcgtcatgattgtttccctctccacacctctttctggatgattgggcagctgtggtgatcctggagctctgggcttccatacctgtgtgggacagggaagctctctcggtctccatggcccaagtgatggctgcacgctcggtccaggaagaggcggaggcaagcccaccgctcctgacattggccttctaggaaaggcggtgttgcatcccacctgcacttcctctctgattcttgagggccaaccgcttcctccgctcctggggaaagtgccttctagcaccgaatcttttggctgccacggatgtcaggagccaacgggactgggttttggctgggtgcaggggaggttgcgtcaggggtacctagccggcggcgggctgggggtggggtgtactttgtccaaacctctcggctcctctggcgggcctccctgaacgtggcgtggactcgcgcacaggccctgtctcgcaggttttcaggtgcgcttggcttttcctccgctttgtggggcaggtctccagtggccccccgggcgcacgcctggacatcactgtccgtctcgtcgtcgccccctacggcctcaaagacacacgctgcctgcatgtgctcttgggggacgacagtgccacatgtggacacactggctccagctcggactcgcctctgtctctctttgcccgtgtcgccggaagccgcctcgggttgccggagccctcgggccttggagatgaaggcaggcccctgctcctgccaggaaggagggaggcagtgggctcatgggtcggtgcctttgcagccgacagcacgccttgcggccctggggatcttcctgtgccccggcgagaccctttccgcctcactgcattggaaccccattcccgatcacccgctgggatccatcatcggaccccaagaggagtccgcgcagcccagccggcaccccgaagctcctccttcagtgggaaccgaagcagaagagcgatcaaggaggtcctcaccacaggactcctatgggtccgaccatgggtctcccgcaggcccctctggcagtcctctccccacccgccgcctcgggctgcgccttcgccgccgccgccgcaacctccagcaccgccgccccaggccccgcagccgccgcgtcgccgccattttttaaagggtccgcagcctgactctgcggagtaagggggggtggagcgggggagtcggcctcgccagcgcgcatgcgcgaggcccgagccgccgcttgggtcacagtgaaagccaccgttgcccggggatgggtccctgacacttggggaagtaggagccctgtgtgatcgtgcgtctgagtctgggctgagaccagtcctggccagggcagttaccaggacggtctccggaggccgggattcgcggagggtccagcagcaggaagaaaccccaggaggaagaaacctcagacagatcgccggcgaggcagcgcgggatcccagcctcaggcgtgcgcggacggtgtgcgggtgagtctccccaaaagtggagcccttgtgatgacgagcacaggtccgcctgcgtgcccgtgggctgctctctcaccggtggctctcagtcgcggagagcagaacccggcagcttcaggggctgcctgcgggagggtgttccctgctgtacgtgtgtgttcgtcatgggtgtgtgtgtgtgtgtgttggggggggtgcgtctgtgtgtgtgtctgtgtgtgtgcgcgcgcagtgcctgtctgtgtgccgacttctgtctctctctcacgtctctctctctctctctctctctctctctctctctctctctctcgctctctctctctctgtctcccttctcgctctttccgtggccctctctttctgtctctgtccgtctgtgtgtgcgtgcgcctcgggacacatgtgccctgtgcgccggagggtgggtttcttgcacgtcggcctttcttctggtcagcctctccccgcgtctctgcctgggtcgtgtggccggttggcagtcgtcgtcccggcggttccagtttgggggtctgtgaaggcctgggcaacgtgggcatcggcgtcggacccgcaggggttttcatcccctccccatccggagcagcctctttgctaggctggatccagacgagcgctccccaaccaaggacaacggcctcccaggcgctcatcgtccacccgcaggagggtgcccgcagagcttcaagaaggtggttgtcacgcctgtcgccctctgccctcatcgagaaatgtagccacagctcgacgcagggacggagaaggaagccggcaaggggatggggcaagcatgtctgtctctcaaaggctggccttcctggccgagtcacccgtttgacactcctccccggatgccggtggtggtggcatggcccccccgtatcctgcctgggctctggcctctgctctgacctccctcttgctgtgtctgccccgcctctgagaagcctggcggcttcttagtgtggctcagtgtcttccacaaagaagacttccccgtccatcagggagaaacctcgtggcggtccgcgtcatgattgtttccctctccacacctctttctggatgattgggcagctgtggtgatcctggagctctgggcttccatacctgtgtgggacagggaagctctctcggtctccatggcccaagtgatggctgcacgctcggtccaggaagaggcggaggcaagcccaccgctcctgacattggccttctaggaaaggcggtgttgcatcccacctgcacttcctctctgattcttgagggccaaccgcttcctccgctcctggggaaagtgccttctagcaccgaatgttttggctgccacggatgtcagggagccaacgggactgggttttggctgggtgcaggggaggttgcgtcaggggtacctagccggcggcgggctgggggtggggtgtactttgtccaaacctctcggctcctctggcgggcctccctgaacgtggcgtggactcgcgcacaggcccctgtctcgcaggttttcaggtgcgcttggcttttcctccgctttgtggggcaggtctccagtggccccccgggcgcacgcctggacatcactgtccgtctcgtcgtcgccccctacggcctcaaagacacacgctgcctgcatgtgctcttgggggacgacagtgccacatgtggacacactggctccagctcggactcgcctctgtctctctttgcccgtgtcgccggaagccgcctcgggttgccggagccctcgggccttggagatgaaggcaggcccctgctcctgccaggaaggagggaggcagtgggctcatgggtcggtgcctttgcagccgacagcacgccttgcggccctggggatcttcctgtgccccggcgagaccctttccgcctcactgcattggaaccccattcccgatcacacgctgggatccatcatcggaccccaagaggagtccgcgcagcccagccggcaccccgaagctcctccttcagtgggaaccgaagcagaagagcgatcaaggaggtcctcaccacaggactcatgggtccgaccatgggtctcccgcaggcccctctggcagtcctcttcccacccgccgcctcgggctgcgccttcgccgccgccgccgcaacctccagcaccgccgccccaggccccgcagccgccgcgtcgccgccattttttaaagggtccgcagcctgactctgcggagtaagggggggtggagcgggggagtcggcctcgccagcgcgcatgcgcgaggcccgagccgccgcttgggtcacagtgaaagccaccgttgcccggggatgggtccctgacacttggggaagtaggagccctgtgtgatcgtgcgtctgagtctgggctgagaccagtcctggccagggcagttaccaggacggtctccggaggccgggattcgcggagggtccagcagcaggaagaaaccccaggaggaagaaacctcagacagatcgccggcgaggcagcgcgggatcccagcctcaggcgtgcgcggacggtgtgcgggtgagtctccccaaaagtggagcccttgtgatgacgagcacaggtccgcctgcgtgcccgtgggctgctctctcaccggtggctctcagtcgcggagagcagaacccggcagcttcaggggctgcctgcgggagggtgttccctgctgtacgtgtgtgttcgtcatgggtgtgtgtgtgtgtgtgttggggggggtgcgtctgtgtgtgtgtctgtgtgtgtgcgcgcgcagtgcctgtctgtgtgccgacttctgtctctctctcacgtctctctctctctctctctctctctctctctctctctctgtctcccttctcgctctttccgtggccctctctttctgtctctgtccgtctgtgtgtgcgtgcgcctcgggacacatgtgccctgtgcgccggagggtgggtttcttgcacgtcggcctttcttctggtcagcctctccccgcgtctctgcctgggtcgtgtggccggttggcagtcgtcgtcccggcggttccagtttgggggtctgtgaaggcctgggcaacgtgggcatcggcgtcggacccgcaggggttttcatcccctccccatccggagcagcctctttgctaggctggatccagacgagcgctccccaaccaaggacaacggcctcccaggcgctcatcgtccacccgcaggagggtgcccgcagagcttcaagaaggtggttgtcacgcctgtcgccctctgccctcatcgagaaatgtagccacagctcgacgcagggacggagaaggaagccggcaaggggatggggcaagcatgtctgtctctcaaaggctggccttcctggccgagtcacccgtttgacactcctccccggatgccggtggtggtggcatggcccccccgtatcctgcctgggctctggcctctgctctgacctccctcttgctgtgtctgccccgcctctgagaagcctggcggcttcttagtgtggctcagtgtcttccacaaagaagacttccccgtccatcagggagaaacctcgtggcggtccgcgtcatgattgtttccctctccacacctctttctggatgattgggcagctgtggtgatcctggagctctgggcttccatacctgtgtgggacagggaagctctctgggtctccatggcccaagtgatggctgcacgctcggtccaggaagaggcggaggcaagcccaccgctcctgacattggccttctaggaaaggcggtgttgcatcccacatgcacttcctctctgattcttgagggccaaccgcttcctccgctcctggggaaagtgccttctagcaccgaatcttttggctgccacggatgtcagggagccaacgggactgggttttggctgggtgcaggggaggttgcgtcaggggtacctagccggcggcgggctgggggtggggtgtactttgtccaaacctcttggctcctctggcgggcctccctgaacgtggcgtggactcgcgcacaggccctgtctcgcaggttttcaggtgcgcttggcttttcctccgctttgtggggcaggtctccagtggccccccgggcgcacgcctggacatcactgtccgtctcgtcgtcgccccctacggcctcaaagacacacgctgcctgcatgtgctcttgggggacgacagtgccacatgtggacacactggctccagctcggactcgcctctgtctctctttgcccgtgtcgccggaagccgcctcgggttgccggagccctcgggccttggagatgaaggcaggcccctgctcctgccaggaaggagggaggcagtgggctcatgggtcggtgcctttgcagccgacagcacgccttgcggccctggggatcttcctgtgccccggcgagaccctttccgcctcactgcattggaaccccattcccgatcacccgctgggatccatcatcggaccccaagaggagtccgcgcagcccagccggcaccccgaagctcctccttcagtgggaaccgaagcagaagagcgatcaaggaggtcctcaccacaggactcctatgggtccgaccctgggtctcccgcaggcccctctggcagtcctcttcccacccgccgcctcgggctgcgccttcgccgccgccgccgcaacctccagcaccgccgccccaggccccgcagccgccgcgtcgccgccattttttaaagggtccgcagcctgactctgcggagtaacggggggtggagcgggggagtcggcctcgccagcgcgcatgcgcgaggcccgagccgccgcttgggtcacagtgaaagccaccgttgcccggggatgggtccctgacacttggggaagtaggagccctgtgtgatcgtgcgtctgagtctgggctgagaccagtcctggccagggcagttaccaggacggtctccggaggccgggattcgcggagggtccagcagcaggaagaaaccccaggaggaagaaacctcagacagatcgccggcgaggcagcgcgggatcccagcctcaggcgtgcgcggacggtgtgcgggtgagtctccccaaaagtggagcccttgtgatgacgagcacaggtccgcctgcgtgcccgtgggctgctctctcaccggtggctctcagtcgcggagagcagaacccggcagcttcaggggctgcctgcgggagggtgttccctgctgtacgtgtgtgttcgtcatgggtgtgtgtgtgtgtgtgttggggggggtgcgtctgtgtgtgtgtctgtgtgtgtgcgcgcgcagtgcctgtctgtgtgccgacttctgtctctctctcacgtctctctctctctctctctctctctctctctctctctctctctctctctgtctcccttctcgctctttccgtggccctctctttctgtctctgtccgtctgtgtgtgcgtgcgcctcgggacacatgtgccctgtgcgccggagggtgggtttcttgcacgtcggcctttcttctggtcagcctctccccgcgtctctgcctgggtcgtgtggccggttggcagtcgtcgtcccggcggttccagtttgggggtctgtgaaggcctgggcaacgtgggcatcggcgtcggacccgcaggggttttcatcccctccccatccggagcagcctctttgctaggctggatccagacgagcgctccccaaccaaggacaacggcctcccaggcgctcatcgtccacccgcaggagggtgcccgcagagcttcaagaaggtggttgtcacgcctgtcgccctctgccctcatcgagaaatgtagccacagctcgacgcagggacggagaaggaagccggcaaggggatggggcaagcatgtctgtctctcaaaggctggccttcctggctgagtcacccgtttgacactcctccccggatgccggtggtggtggcatggcccccccgtatcctgcctgggctctggcctctgctctgacctccctcttgctgtgtctgccccgtctctgagaagcctggcggcttcttagtgtggctcagtgtcttccacaaagaagacttccccgtccatcagggagaaacctcgtggcggtccgcgtcatgcttgtttccctctccacacctctttctggatgattgggcagctgtggtgatcctggagctctgggcttccatacctgtgtgggacagggaagctctctcggtctccatggcccaagtgatggctgcacgctcggtccaggaagaggcggaggcaagcccaccgctcctgacattggccttctaggaaaggcggtgttgcatcccacctgcacttcctctctgattcttgagagccaaccgcttcctccgctcctggggaaagtgccttctagcaccgaatgttttggctgccacggatgtcagggagccaacgggactgggttttggctgggtgcaggggaggttgcgtcaggggtacctagccggcggcgggctgggggtggggtgtactttgtccaaacctctcggctcctctggcgggcctccctgaacgtggcgtggactcgcgcacaggccctgtctcgcaggttttcaggtgcgcttggcttttcctccgctttgtggggcaggtctccagtggccccccgggcgcacgcctggacatcactgtccgtctcgtcgtcgccccctacggcctcaaagacacacgctgcctgcatgtgctcttgggggacgacagtgccacatgtggacacgctggctccagctcggactcgcctctgtctctctttgcccgtgtcgccggaagccgcctcgggttgccggagccctcgggccttggagatgaaggcaggcccctgctcctgccaggaaggagggaggcagtgggctcatgggtcggtgcctttgcagccgacagcacgccttgcggccctggggatcttcctgtgccccggcgagaccctttccgcctcactgcattggaaccccattcccgatcacccgctgggatccatcatcggaccccaagaggagtccgcgcagcccagccggcaccccgaagctcctccttcagtgggaaccgaagcagaagagcgatcaaggaggtcctcaccacaggactcctatgggtccgaccatgggtctcccgcaggcccctctggcagtcctctccccacccgccgcctcgggctgcgccttcgccgccgccgccgcaacctccagcaccgccgccccaggccccgcagccgccgcgtcgccgccattttttaaagggtccgcagcctgactctgcggagtaagggggggtggagcgggggagtcggcctcgccagcgcgcatgcgcgaggcccgagccgccgcttgggtcacagtgaaagccaccgttgcccggggatgggtccctgacacttggggaagtaggagccctgtgtgatcgtgcgtctgagtctgggctgagaccagtcctggccagggcagttaccaggacggtctccggaggccgggattcgcggagggtccagcagcaggaagaaaccccaggaggaagaaacctcagacagatcgccggcgaggcagcgcgggatcccagcctcaggcgtgcgcggacggtgtgcgggtgagtctccccaaaagtggagcccttgtgatgacgagcacaggtccgcctgcgtgcccgtgggctgctctctcaccggtggctctcagtcgcggagagcagaacccggcagcttcaggggctgcctgcgggagggtgttccctgctgtacgtgtgtgttcgtcatgggtgtgtgtgtgtgtgtgttgggggggtgcgtctgtgtgtgtgtctgtgtgtgtgcgcgcgcagtgcctgtctgtgtgccgacttctgtctctctctcacgtctctctctctctctctctctctctctctctctccctctccctctctcccttctcgctctttccgtggccctctctttctgtctctgtccgtctgtgtgtgcgtgcgcctcgggacacatgtgccctgtgcgccggagggtgggtttcttgcacgtcggcctttcttctggtcagcctctccccgcgtctctgcctgggtcgtgtggccggttggcagtcgtcgtcccggcggttccagtttgggggtctgtgaaggcctgggcaacgtgggcatcggcgtcggacccgcaggggttttcatcccctccccatccggagcagcctctttgctaggctggatccagacgagcgctccccaaccaaggacaacggcctcccaggcgctcatcgtccacccgcaggagggtgcccgcagagcttcaagaaggtggttgtcacgcctgtcgccctctgccctcatcgagaaatgtagccacagctcgacgcagggacggagaaggaagccggcaaggggatggggcaagcatgtctgtctctcaaaggctggccttcctggccgagtcacccgtttgacactcctccccggatgccggtggtggtggcatggcccccccgtatcctgcctgggctctggcctctgctctcacctccctcttgctgtgtctgccccgtctctgagaagcctggcggcttcttagtgtggctcagtgtcttccacaaagaagacttccccgtccatcagggagaaacctcgtggcggtccgcgtcatgattgtttccctctccacacctctttctggatgattgggcagctgtggtgatcctggagctctgggcttccatacctgtgtgggacagggaagctctctcggtctccatggcccaagtgatggctgcacgctcggtccaggaagaggcggaggcaagcccaccgctcctgacattggccttctaggaaaggcggtgttgcatcccacctgcacttcctctctgattcttgagggccaaccgcttcctccgctcctggggaaagtgccttctagcaccgaatcttttggctgccacggatgtcagggagccaacgggactgggttttggctgggtgcaggggaggttgcgtcaggggtacctagccggcggcgggctgggggtggggtgtactttgtccaaacctctcggctcctctggcgggcctccctgaacgtggcgtggactcgcgcacaggccctgtctcgcaggttttcaggtgcgcttggcttttcctccgctttgtggggcaggtctccagtggccccccgggcgcacgcctggacatcactgtccgtctcgtcgtcgccccctacggcctcaaagacacacgctgcctgcatgtgctcttgggggacgacggtgccacatgtggacacactggctccagctcggactcgcctctgtctctctttgcccgtgtcgccggaagccgcctcgggttgccggagccctcgggccttggagatgaaggcaggcccctgctcctgccaggaaggagggaggcagtgggctcatgggtcggtgcctttgcagccgacagcacgccttgcggccctggggatcttcctgtgccccggcgagaccctttccgcctcactgcattggaaccccattcccgatcacccgctgggatccatcatcggaccccaagaggacaccccaagaggagtccgcgcagcccagccggcaccccgaagctcctccttcagtgggaaccgaagcagaagagcgatcaaggaggtcctcaccacaggactcctatgggtccgaccctgggtctcccgcaggcccctctggcagtcctcttcccacccgccgcctcgggctgcgccttcgccgccgccgccgcaacctccagcaccgccgccccaggccccgcagccgccgcgtcgccgccattttttaaagggtccgcagcctgactctgcggagtaagggggggtggagcgggggagtcggcctcgccagcgcgcatgcgcgaggcccgagccgccgcttgggtcacagtgaaagccaccgttgcccggggatgggtccctgacacttggggaagtaggagccctgtgtgatcgtgcgtctgagtctgggctgagaccagtcctggccagggcagttaccaggacggtctccggaggccgggattcgcggagggtccagcagcaggaagaaaccccaggaggaagaaacctcagacagatcgccggcgaggcagcgcgggatcccagcctcaggcgtgcgcggacggtgtgcgggtgagtctccccaaaagtggagcccttgtgatgacgagcacaggtccgcctgcgtgcccgtgggcggctctctcaccgctggctctcagtcgcggagagcagaacccggcagcttcaggggctgcctgcgggagggtgttccctgctgtacgtgtgtgttcgtcatgggtgtgtgtgtttgtgtgttggggggggtgcgtctgtgtgtgtgcgcgcgcagtgcctgtctgtgtgcggacttctgtctctctctcaggtctctctctctctctctctctcccttctcgctctttccgtggccctctctttctgtctctgtccgtctgtgtgtgcgtgcgcctcgggacacatgtgccctgtgcgccggagggtgggtttcttgcacgtcggcctttcttctggtcagcctctccccgcgtctctgcctgggtcgtgtggccggttggcagtcgtcgtcccggcggttccagtttgggggtctgtgaaggcctgggcaacgtgggcatcggcgtcggacccgcaggggttttcatcccctccccatccggagcagcctctttgctaggctggatccagacgagcgctccccaaccaaggacaacggcctcccaggcgctcatcgtccacccgcaggagggtgcccgcagagcttcaagaaggtggttgtcacgcctgtcgccctctgccctcatcgagaaatgtagccacagctcgacgcagggacggagaaggaagccggcaaggggatggggcaagcatgtctgtctctcaaaggctggccttcctggccgagtcacccgtttgacactcctccccggatgccggtggtggtggcatggcccccccgtatcctgcctgggctctggcctctgctctgacctccctcttgctgtgtctgccccgtctctgagaagcctggcggcttcttagtgtggctcagtgtcttccacaaagaagacttccccgtccatcagggagaaacctcgtggcggtccgcgtcatgcttgtttccctctccacacctctttctggatgattgggcagctgtggtgatcctggagctctgggcttccatacctgtgtgggacagggaagctctctcggtctccatggcccaagtgatggctgcacgctcggtccaggaagaggcggaggcaagcccaccgctcctgacattggccttctaggaaaggcggtgttgcatcccacctgcacttcctctctgattcttgagggccaaccgcttcctccgctcctggggaaagtgccttctagcaccgaatcttttggctgccacggatgtcagggagccaacgggactgggttttggctgggtgcaggggaggttgcgtcaggggtacctagccggcggcgggctgggggtggggtgtactttgtccaaacctctcggctcctctggcgggcctccctgaacgtggcgtggactcgcgcacaggccctgtctcgcaggttttcaggtgcgcttggcttttcctccgctttgtggggcaggtctccagtggccccccgggcgcacgcctggacatcactgtccgtctcgtcgtcgccccctacggcctcaaagacacacgctgcctgcatgtgctcttgggggacgacagtgccacatgtggacacactggctccagctcggactcgcctctgtctctctttgcccgtgtcgccggaagccgcctcgggatgccggagccctcgggccttggagatgaaggcaggcccctgctcctgccaggaaggagggaggcagtgggctcatgggtcggtgcctttgcagccgacagcacgccttgcggccctggggatcttcctgtgccccggcgagaccctttccgcctcactgcattggaaccccattcccgatcacccgctgggatccatcgtcggaccccaagaggagtccgcgcagcccagccggcaccccgaagctcctccttcagcgggaacggaagcagaagagcgatcaaggaggtcctcaccacaggactcctatgggtccgaccctgggtctcccgcaggcccctctggcagtcctcttcccacccgtcgcctcgggctgcgccgccgccgccgccgccgcaacctccagcaccgccgccccaggccccgcagccgccgcgtcgccgccattttttaaagggtccgcagcctgactctgcggagtaagggggggtggagcggggggagtcggcctcgccagcgcgcaggcgcgaggcccgagccgccgcttgggtcacagtgaaagccaccgttgcccggggatgggtccctgacacttggggaagtaggagccctgtgtgatcgtgcgtctgagtctgggctgagaccagtcctggccagggcagttaccaggacggtctccggaggccgggattcgcggagggtccagcagcaggaagaaaccccaggaggaagaaacctcagacagatcgccggcgaggcagcgcgggatcccagcctctggcgtgcgcggacggtgtgcgggtgagtctccccaaaagtggagcccttgtgatgacgagcacaggtccgcctgtgtgcccgtgggctgctctctcaccggtggctcgtagtcgcg

SEQ ID NO: 26 - DNA, 2730 bp, Homo Sapiens
gtctccactcgcgcgcccacgtgcgtggataaacgcgggaattcggcagccctcaacgtcactctgcagagatttccgggctgtgagagagttggggtgtgcggcgggggaggggagggtctgatatcttcaggttgagagtcaagtcctgggggagcggcatgggcgggggtggccggggggaggcggaggatggagcgcgaaccagaaagcgcagaggaccctcggcccgcgccgcacccgctgtgattagctccagaggcgcgatccgggagggcggactctttcttaaccctcattgtctcctcctccctcttcctttttaaaagacgccttgcgggcagagctgtcagcaaccccgcggccgtttgtacttggccgcggcggagctgactcctgctcctgtgacagataggggctggggctgagcggccgcctgtctggggtactcgcacgtggggaacaaattcttttcctccggctcctctcgggacccggcgatcgccacaggttgggactctgtgcggcgctggagttggcagccccgggcgctatggctcccttgaggagtggggagggaggtggccggggggttggcgcgcccctcgcgcggggagcgctatgagccgggcgaagggcggcagcgacagccccagcaactgcctctgccggcgcctcccgcaggccctcgccaactcgccccgcgcaccatgctgactcccggcctgcggaactcgtagtgcagcccctgtcgcctccccggcccctgctatcccacgcaggactggcttcggccgccggggccagcagcttgcgacgtgtccctggggaggcggaatcgctgtgcgccctgagcccgggctcagcccttcgctttccagctgcgtcctgctcccggccgcccagggagcccagtggcgatgagggcactgctggcgctttgccttctccttggctggctgcgctggggcccggcgggcgcccagcagtccggagagtactgccacggctgggtggacgtgcagggcaactaccacgagggcttccagtgcccagaggacttcgacacgctggacgctaccatctgctgcggctcctgcgcgctccgctactgttgcgccgcggccgacgccaggctggagcagggcggctgcaccaacgaccgccgcgaactggagcacccaggcatcactgcgcgtaagtgcggggccctcggggacatatccccgcccgcctaacggcggcggctgcatgtgtgcgcgggaggatgcacagacccaggcaggtctatgcgccttcctgggtctgtgcgccagggggacgcggccgggtgggggaatcaagggatgagtgggtggtcgcgtttcagatcatggtcctctattcatttgcagtcccgcttcccgccacttgcggtctctgcgggtcggcccgcagggaaagtttgccagggacagtgaggagcgcggggcttgtgcctggtagccggggggaagacagctggagctcccgggagaagggtagtgcgggtaaagccagggtagacttgggttttggtggaggggccgagggtgtcccattgctcgcccttgtcacttcgggagcttcgggaagtgccgaatgcagggaatcgcgactcttgtcgcgcgctcatttgcagcccttcagggctaagaaaccccagtcactttttttttctgtcttaatgatagcgtttctaagccacggccccgttctgcagacttcctttcaattctctgcatcgaattaccctctccggcccaccccctattgtcacgcctttcagaaatgcccaggtcttcgaggtggagatttagaaacaagggtcgaaggggcttccccgccccctattctcacttcggaaaacacgggtcaaatttccgctgacttcagagcggaataaatcacgaccccagcagagaaaatttacaccttgaaaaaaagttttccacctgaatcggaacatcagggaaacgctttagagcttgaggcgagggttttatggccagggaaaccggagaagcgggcggagctgagagcgggtgacaccccaggactccagagagccgaggtctggagcccgcaagagaaggtcgccgggaaagggaagagaggctggagagatcattaagggttccccaacggcccctccccgcaaactgataacccagaggacaggggagtctgccctccattagtgctccactagagggtgaatgttgggggtcaacatttccaatctagaggattctggaagtagttctggagaaaagatgctcagcggaaagtagggaaatctaggccctcctggcctgttagaaaaatatagactcttccccacggcttcactcgctcaccctgggggacccagctgccctctgggagtaagtgcaattgcccagtctgcagcacgggcttcctctgcgctccctactcggctcggatgccagaggacagcagaagggagaggcagtctccacactcactgagtctgggatcaggcaaaccctgatggaccttggctctgtcacttgccggcggtgtaacttgggcaagttacttaactgctctggatacctcttctcagttctaaagtgggcatattgctctcaaaggagttaagttgttggtgacgtgagagtgtatgaatgctggagcgcagggctcagtaaatggtagttacttacctttgccttgccttgcacgctg

SEQ ID NO: 27 - DNA, 2396 bp, Homo Sapiens
atttaccatcttaatcattttaggtgtacagatcataagtattaactatattcacattgctgtgcaacagatctgcagaaattatccatcttgcaaaactgtagctattgaataacagctccccattttcctgcctcttgtggtggttttaaatacaatgcaatacatactagctgaaaatggaaaaaagaagtatatgaaaatgttaaatgcatagcacaaaaaatgaataatagggtcactttggttataactttaaatgagaaaactcaaagtaaaacaacaatctatgatatatcatataaaatgcacaatttaaaatttttaaaatttaatattaacaaaaatatatgtaatacaccacataagtattcaataaaactgaatacaattatgtttaatttttttaaactgtgaaaaagatcctattaacttttgaatatttacgcaaggaaaccaagtacatctcttcttgaaaaagtttgattccaattttttttttctttttttttttttgagacagagtcttgctctatcacccaggctggagtacagtggcgtgatatcagctcactgcaagctccgcctcccgggttcacgccattctcctgcctcagcctcccgagtagctgggactataggcgcccgccactgtgcccagctaattttcttttgtatttttagtagagacggggtttcaccgtggtcttgatctcttgacctcgtgatctgcccgcctcggcctcccaaagtgccaggattacaggcgtgagccaccacgcccagccagtttgattccaattttaacagacaggtgtttttgacaaccagtttattttcttactgaaattttctttttctttttttaaaaaattttaaatctttaatttccgttttcacttattttcttcttgcttccaaaaggaaaggagtgcgtagctctgttgcctgtacatcgtccacagcccctggctcggggcagggtcccctaggccgcccgggggtccacatgcagcccctggggggccggcgcggggtgaggtccggccggttggggccgccgctaggcgcgctggctgggcagctcctgggagatgaagcgacgcaggcgctccaggtactggctgtagagctcgatgtcgttgtgtccggcgccctccacccacagcggctccaccgccttggggcagcgctcgtagagcgccagcccgtgtgagaagtcgatcacctcgtcctctatgccgtggatgatgagcacgggcgacgtgatcttggacaccttctcgatgttagggaaggcgtcgaagcagtaggtcttggtgtcggggaaggcgacgcgcatgcccgaggtgagcggcgagtgcagcaccaccgcggcacactcgtagcgcgaggccaggtccacggtgggcaccgtgccgatgctctgcccgtacaggatgatgctgtccgggctgatgccgtacctggcggcgccggagcagggtcagccgcggcctccgaggcgcgcgcacccttcccaccagcgggcgtccccgggcccagctccggatgcgaccctctagtctccccactcagccaagtcagtgggtcaggcccaggctccacaccagtcccgagggccacccccagcccccaacaccgcggcggtgggcgaggccagcggccccgccccgttccctggcgctgccgttcactggcgtttcctagcaaggatctgcagggatcccgcctacggagtgcccctggggcaggggtaggggaggccctggcgcctgttctcctcctggtcacccctaggtgcacactgggaactgtgtgccccccacatcctgaatgcttcaggcctccctgcccgggttagaaagccgttcctggtgcactggccaggacagcggacactcttccttcctgcagcccttgcccacccccttggccatgaggaattcaggcagctgtgtccccagatgtctccacccaattttggactctcggagtccccacgcccaatgagatgccagtgcaacccaggtcagcatcgaaggtggtggctgcggaggtggcaccccctcccaccagcaccttcccttgggagtggacaagtcctcggccacctcagcaccaccagctcccacccagggccacccccacccccaggtcattggtgtgcggcccttgacccagctgatccagcaccagttacaaggcctcctcgtacccagtcccaaccacgcgggacccacctgccaccctgcccatgccaggaccccacaactctcctcccacacgctccaggctctgatcccaggcagacaccctcttgcaaggcaggagcatgggcaggtgtgcgtcccctctgcctggcattcggactccaccagcagggctgtccccgt

SEQ ID NO: 28 - DNA, 3190 bp, Homo Sapiens; identical to SEQ ID NO: 17

SEQ ID NO: 29 - DNA, 2478 bp, Homo Sapiens
tcatgagatccaatttggttgtctttcctgttgagtgagttactaaaggttccttgtggggtggaggggcgtgagggagtagatcacagacctcatgtcagcatcaatttcacatctacctgctgctgggtcctttcttgagctcaaaatgagctagaactcagggctctagccctggatcatgcaacctgttgttcttccctaagccatgtctgatttggtttaaaagtaatttcctctccatctgtatctttaacttcaaggaagtgggagagtcagagcaagctaagcaaactgcggccccagcaacctgcctcccgacccccaaagttcaagggaaggtatgctgagagagtctgccaattccgcttcgatataagaaaaatgataaaatcagctactgacattttcctgattgtacccaccccagacctgggaaagaacatttggcttgctataaatacaacaggagccacacatttttcaccttcatttcttcccctcaaagtaagatgattctgtaaacattctcatgaaggattcgcttacaaaaaaacaaaaaccagctccagctgctggtgtactattaagttgttgatcaggtatgaaacaagtgcaacaggtaacagttaacccaatagcctccctctgacccctacacactgagcaaaagctacacaggccaaatggaagcccagtgaccagctccagacttgaaataaaacctaaatcctgtctgtgagaagcctcatttgagctaagtttatcctttgctgggacatactgccacttgcaatgatcccagcccccagcaccaccttccacccaaacttcctctcacaaaattgacttaggcaatcgatccaaaggtaagctagctttcacagaaagacagacatttaaaaaaatgatccagataaacaaatcacacctccacagccaggaacctagagtcgaactaatttaatcagatgtaaaattaatgagaaccccgagacttccgacgtcccactccagaactcccatccaggtgcggtcgggagccacagcttctgaatattccttcggaacttttttctcacttgattcccaagcctgtcatggggttctttttcaatggcactgacctgcaattacccaacgagcagcgggacagccccgggcaggacgcatcctgggtgggtgacgtgatcccgcagtctcctccccgaccccatatcccatacaatgatcctcgcttacagaagtcaagggggaaagatgacgctttcaaagcccgaatctctttaccctggagccagaaccagcgtcgccgccgtcccctgcagctcagccggcaacgcgcgccgagcctcggggcgcagcttggagacgcgcttgctcgttctgggaaggggcacgggacgcacggttccccggccccagctgcacagctcagctcggggctctcacctatcctcgttcagagccacattcggctgcctcccctgaccacccgacacaaagagattcgccggtggaaagaatcgatttcaaaattcaagctcaccgctgctcaacaaggcgcgcacgtttctccccgtctggcttcacatgtcccaaacttccagtaacagaaatgaggaagcagcagccttccccggctgctggcggaggcagtgggtgtaacttgtgaagtttcgtgctatgatgaatctggtcacttgggtgtgttggagagggttggtcgctcctcccttcctcctcccaccatcacctccctcctctccgcctccctctccaatttaattcttccctctggcattcgccggctgtcactcagaatcccagcaccctccccaccacatccttgggggcaatgtatttcgaaaaggtcttaaccattttacggatgaacctggtcaccctgcacaaagcgtgagtgcttgtcaaataattttctacagcacgtggcaaaaaagcagcgcctcttaaaagatataaaaggccagcaatgttacataagcgccccccaccagcccttcaaggacagaaacgtgggtagttcattcagtggagacctaactcccaaacatctattgaaaaggagtgaagggcagaaaaacagaaaccaaactttcagttggctgccttttctttcatatgtactagaaagtatttccaatatacaacatatatttgaaaagaatataatgaacacccacgtgcccaccatgtagcataaaaaaattaaaattactcacatagtggaaactatctgtcaacctcttcctcgctgaaatacatccctctttccttccccctggaaagaaaactgccccaaatttgatttcccatgagcaatttttatatcagtttctaaaaatgtgaaagggaacatgctaacttaaagtttaccagaaagccatgcaatgaacatccctctgctgtgcttgaccttggtttccaaacagaagtttctttaaataaaactttaaa

SEQ ID NO: 30 - DNA, 2387 bp, Homo Sapiens
tcacagtccttgggccctgctctcctctccattgtactctcaaaatgcaaggcgcaacgacaatagtaacgtcccagttacttctgagactctctaaactctggacttgcctccctcccctccttcaaagtctttcgaatcttctccagcggacaaatgaagggactgaagctggacaaaaccataacctaggagatcagggacctaccccattctgttccccgtgcttggaatcagataatttaggacgccgggcccgagaagcctggataaaaaagtcaggaaaaactgagtttcgttttgacctctagcgtcgtggcgggctggcatctgagctggtaacgtgcgtggtaggttatgtaagaaaagggatggaggagccgccccagcgggagccagaaaggacgcggtgttctcggttgcaatccccaccctcctcacccagcagggcaggaggcacccaacttggaggagaaaggggtgggggaggtgaaacagagaccggagagtcacgagggctgggccgccgagagcaggagaatataccgtgtcacacacctccattctctcacacacgttgcagacacaaatcactgacggtttccacgtgctgcgctcgtgagcggaggtgttcaaagagggggcagatgagttacttcccgagacggaaccgggggtcccacgtccgccgccttcagtagcacaaccaatctctgaacactcaaaccgcgcatctctggcgcatcaccatcctatttaaggccacgggctccgcccttttcctcccctcccttcttttccactctttttccatcctcctccttttctcatcaccgggtcctctccagcagccgcatgtaggggaggagcacggaatgcttcccttacagccaatcatcacctggctgcctctctactggctgagcccctttgtactgtagcaaatgggctatggacttcagtaactagagtcacgtgttaccggcgacacaaccaatgagggcgcgagatctgtgtaagcagggggaggcacgtgccgggccgcacgtgtctgggagggggggaaggggcggggcccactgagagaggcggaggtgggtagatagacccggagagacggcgaaggagctggaaaccgagccagggctgagccggctgacaacaggtaaggagattcggaggacaaagcgagctgttagggagtatttgggagtggatttgggggctgaatgcagatcttggtattgggagggtttgcatcacgtggcaggtgcgagcccagagagaccggcgcagggatcctgatcttgaaagattgggagagggcaggaggccagtctctatgggggcggttcccgtaggatcaccaggtgggttcgcgtgcccagattgactgcttgtgggtggcatggcctcaggtggagaggcttgctgcggactcaggctggcgaatagccctggcgaacaacgggcggaggggaaggtgtctttcaagtcggtatttactctgaactgagggaagaaaagaacggaggccgcgtcagaccgagagctgctctgcggcggccagagagggaatcccaagctcttaatgggcgggggtgggggtagaaatgtctttttctattgtgtttgagaccggtaatattggggagggggagaacaagtattatcccacgcagtacaccccaatctcccagttcatttcctaatccttaaactctggtttcaaactccctcgctttgctcttcagttgcaggttccgatctttgggtactccaggagctgttctatagcccctgcttctggacctatggattctccatctagcgtttcttcctattcctcctactctctctcttcgtcttttcccacctccccagtgaacagtgactttggcttcccctctgatagtgagagggaggacaagggggcccatgggcccaggccagacactgttgggcagaggggaggttcacggcccagcccgggtcctatccgctgcaggcatcgatcgaaggtttccggtaaccagcatacaccatctcatccgaaacagcggggttcggcttctcctatggcaggatctggggcgaaaagatcaagagatggtgaactggagaccagtctaaacacccaaggttgtaccacagagggagacctgctgtttgcccagaaggtaagagaaagcaggtgaaaggagattctcctggagtgccttagcacccagctggttgataaggaccctgtgaggacagtattgactcccagatttggaggtgaaggaagagccactgctggtgtgggcagttttttgtcttcttacagcctttgtcctattttcctacagtgtaaagaactccaaggatttatacctcctctcaca

SEQ ID NO: 31 - DNA, 2320 bp, Homo Sapiens
aaccatttagacgcaaagtaaatctaagtaaatatttaaaatgcaaaatttacaccactcttgctttctcgtaatgcaatggagctacaaatcataaaagtttaaacaaagaagccaactgcttagaaatataaaagtaagggagcaaagaggacatacaatgacgtatcgtttgtactaaaataaatataagcatactacgtagcaaacgagacagagcccaaactgtcactgggcatcaatctgtagcttcaaccgcgaatgccatttcttaaagtcagacaaaagaaacatgtggggcgcaaaccccaggagtttaggaaaacacttctggtttaaagaggcatgtcaagtggccctcacacagaccccgccgacccaccaccagaatccctgcaatcaacagagaccacagctcacaccgccgccactcccgcaggtggacaggcaagctaggctggggaaatggggtgaaacccaccactcaatgccgccttaggccccctgcccctaaagggaccccgtgcctgaggtccacccaccatggggcttggggtcctggagggccatcacactaatcccccctgccacctctccccatctccagcgttcacggtgacccaggaactttgtgctcagccgtctggggcaattctgtccgcctccaatccatctgtcaaagccctgagtcccaggacttcagaatgtgaccgtgtttggagacagggactcgataggggagattaatacgaagtgaggtcacatgggtgaccctaatcccatctgacacgtgtccttataggaagaggagatgaagacacagatacgcacagaggggcagccctgtgaggacacgtggagaagacggcgcgtgcgagccagggagacagaaaccaaccctgacaacccctgatctcagacttccagcctccagagctgggggaaagtacgtttctgctgttgaagctgccagtctgtggtgccgggttacgcgccagtacccacgcgccagccgagacagcaatagcgagacactccggacaggcggagggcgtgcggccttcccaccgcccacctgaaaacactgcctaaaggtgagcccagtccacgaagcctgcatgaaatgacgcgttcaacagcaggaaggacctgggtggcataaaaagaaaaagagtcagggagaccaagtcaggagaggggagaatgagagtggaaatggtttggctgtgtccccacacaaatctcatcttgaattgcagctcccataattcccatgtgttgtgggagggacccagtgggagataattgaatcgtgggggcggtttgcccatagcgttctcatggtagtgagtaagtcctgagatctgatggttttaaaagcggaaactcctctcgcttgactctcattctgttttgtctgctgccacgtaagacgtgcctttcgcctttcaccaggattgtgaggcctccccagccacgtggaactgtctgtcccttaaacctctttctcttcataaattacccagtcttgggtatgtcattatcagcagtgtgaaaacggactaatacaagactcttcaaaggacgccgagcccagcacctccccaaagcctgaggaactggagcgacatgagggcttggttcaatcttcctgaccgttgagttctgaccccacctcccggggggcagggagatgtggagtgaggaggtattcactgaacatttctggacaagtggaggccgcagtgggcacttgggcagacagcagtctgtgacgtgcaggctgcccaggaggctggagctgggtgcagggccccatagcagtcagcccctgcagccaacaagcacctgtgaaatctcgacggcgcgcaatgcagtaatttatctgggctgcgccgggaggctggctggctggagccgttgggtctggggtgtccccttgttgcttctccttcgtggactgggggctggtggggacgagctgcttccctcagcaatggcgaaggtgctggggagagtagaaaaccctccacctctgtaggcccaggccccgggcctgcacactctctcctccgcccacgtgccccggggtgagcccagttcagggccaggacacgcattcctccttctgagggaggaacggtctcctggcagagggcctggatgcagggcagagtgaaaaattgtggccaattatgccatctgccacaccggcctgagaagttggactgcatcccagggcagcaggggccatcagcaagtgacagggagctgggctgcagggaggtgggaggccgagaaacctgtcggaggccactgt

SEQ ID NO: 32 - DNA, 2728 bp, Homo Sapiens
ttctcatttataaaactaagctataaaagaaaaaaagaaatagtggaatgagaggcaagagcgcgcaagcaagagcaggtgtgaacggttgcatgcgatggcattcgtcacagctgggatatcagagagagtcagatcctaggtcagatgcaccataggggtcccaggatagtccatcgcccctcccccaggactggccttggcatgtaaccccagcagctccaggcagctgtctttcggcggaacttctaggagtgggggcacccatcagcgctgacctgcggggctccagctgaggacagtccggccgtgggagtttataaagtaatggacaacaggcaatgctcttcctgcccaacagcagtggtcagagggacagatctatcctcacagagactgtcaggcactgtcgctacagacacggcccctcccccggcactcagtcctgcctgccttacacaggagtacaggaaaggaacttccaatgagtccatcttttatgttaggagagaggcaaggtgctgagtttcccatccggggagttcagctgcaccctctccccagcccccacctccctgacttcccctcctccctactacccctaaccagtggcccatcattcctttcccagtcagtcttggctgtgatgttaagcggctctgccggaccccatattttgtctggtctctaaaagggcactgacctgagggtacaaatgcagaggccccggggcagctaggcagccgcgagcaacccagcacccagctgcctagggtgctccaggcagcggcggcagcagctagaagctggtgtcattattacacaagccaggcaaatcctgctccagtacacagagcgcatctaaccagcaggaaggaaataagccaaaatcctcccgacaccacacacacacacacacacacacacacacacacacacacacacacgagtctgaggacaaggacaaacactttgcagaaagaaccctccccccaccccaccgacgtccaagtccctgtttcaggattcctcaccccccagtagcttctaaaatcctcgtgtttgaccacctctcccaacacatgggacagagagaatttggctaacttcaaatcctgtctcctgagcacttgcccacaaatagtagggggagtgatggggacgcccccctgttccctccaccaccctcacttctgccccccacgccactctcaggttgacagcgtcggggaaagacatcagaccatcaatccagcttttcctgccagctggggaaacaacactcggtcactaacagcacccaatcacctagagagcgagagtgagccgaggcaaacacgccgggttccagacaccgtcccagcccccgagacccgggtttgcaaagggctgcacacgttcgccggagggtcgctgccgcctccgagaaaggacttgaacctgagcccggtgaaggtaaaatgacacagagactcacctttaggttgtgtgtggggttgacgacacagacaagttgcccggcagcggagaaaacccgtttagccttgtagtgctgaaaccggagatgaatgagatctaatacagccccaaagcactgggtaaagaaaagcatcacaacttttggggggttgttggtccgggaaggcagcggaggaagctgtgagtccttgggccctggaaggagcgcagcctctgagacactccgctccagcccggcttagcgcgccttcatattcatcatcaaaataagacggttagaatcttgcagcagtgaggcggccaatcaaaaggacagaaatgttatccttgaggtgcagagacagccaataacaaatgccttccctaccgaaactccctgatgaattgagcctggcggagaatgtattattgaacattaccatagatcagcacattgcatttatcttgtgattacagccaaccatacctaatgctggggagataggctgacaaaattgattgcttaatgtgtctccatttattaattgacttaatttaacatgagagcctttcttaatgccctggcaagaacgtaaagcgtttaagccgccaaatagtacaacaccccgctccaaagtaggcagatggataacgcagatcatggctcgactcaccagagctgcttgggagaaaataaaatattactagactctgaatccagataaggacttggcagcagcaaaaatgtgtatctttcaatcttgcgttctgactttctgcaatttggattacagccccttgataaatcttactctccactctttatcaaagaaaagaatccctgacaaattcatttggagttgaggggtggagggaagcacatacatatatattactatacatatatatatattttctttttttcaaaatactgtgattactgaagtctgaaagtattaaaggataaaaatgcacagagtatgcttcaaaaaataatgaaatccctgatgcatgaatgcacacacacagaaaaacctacactgagaggaaagaggcttgtaaatcagcaaaataattacagatgcagagaacctttgcttgtcattcatttgcatattggtgggcagcaaattgctaattaaccactagattgctggagacattaaaatagagattaaggatgcacataccacatcatttacttgtttctgcaaatgctagcagcacatttctgtgctggcacaggcagagggcattccagtcctcagac

SEQ ID NO: 33 - DNA, 2673 bp, Homo Sapiens
gtcaggtgacctccccggagcaccgactggggtcgcaggcgctctgtcccgccgcctccggagcctgcctttggggagtgggggtggtcgcaaccaccagccgcgaggagaggattgcacctctcccccccggccggcatccgaacagagccagtctccacccctgcagtggcgaagtgtttacaaagtccgcgccgcgccgccgatccagagctgggcaggaagtggggaagagggggcggaggagacaaaggggctggtgctctgctcagccaagtttcggtccccggcctgactctcccaccccctgtacaccctcggcgaggccaggaggctcatccggcgccgcgcacccccgcccgcagcccccgccccacgcggcataggtgcgggggcggggcgccacggaggctcaggtgtgggcggcggggccggggcagcacgggttcccggaccgctgcctcccggcgttggcaactcctccacgtgctatccaggaagtaaacaacatcatgaggagcgacttctttttctttttcttttttttgagatggagtctccctctgtcgcccaggctggagtgcagtggcgcgatctcggctcactgcaacctccgcctcccggattcaagctattctcctgcctcagcctcccgagtagctaggactacaggcgcacgccgccacgcccggctaattttgtgtatttttagtagacacggggtttcaccatgttggtcaggctggtctcgaactcctgacctgaggtgatccacccgcctcggcctctcaaagtgctgggattacaggcgagagccaccgcgcccggccgatttcttgactcttactacacgtcaggcactgtgacagactctttctgtgtatcatctcatctttcccccagctttacagaagaggaaactgagacacactgaggattaaggtcaagtgcccgaagtaccatagctggctagtgttaggatccaagcccagaatctgcgtcctgccaggcacctgcaaatggggacgaacacggcgcagctagaggggctgacaggctagggagaaaaccactggtagccgcgggcaccccacgccctgggagtgaggcggcaagggacaagtctcccgccccctagacttgcctcgcaaatacttgcgggtcgagggcgcgaaggcagcaggatgcagcgatagacttggactaggtggtccaggctctacttccaagtgggccattgacaggcggggcggccctcagcacaaaatcaccaggctggatgctccagggtttcccaacattactcgctcagaagaatcatctggggagctccttaatgagaaagattcccaagcccctcttccagagagtgaagtcactgggattgggctgggcccagccaggtgttactaataataagacaagtttggaaaaccctgcgagtgtagatgatctcctggtatgctctttataagaaccgattttcatattaaaataggtttcttttaactcagtgaaaccgggcgcgttttcctggcccacaaccaagccactgaaggccccagaacacttcactctcaaaaggtcacgtgaggctggcgcggtagctcacgcctgtaatcccagcaccttgtgaggccgaggccgcggactgcttgagcttaggtgttcgagaccagcctggccaacatggcgaaactcggtctctactaaaaatacaaaaactagcggggcgtggtggtgcccgcctgtaatcccagctactccggaggctgaggcgggaggatcgcttgagcctgggaggtggaggttgcagtgaaccgagatcgcgccattgcactctagcctgtgaaacggagcaagactctgtatccaaaaaaaaaaaaaaaaagtcacgtgagccggggtcaccggaggcgtcccccaaccgactgggcttcggaaaaccaaggggcgcacgccgccccgccccgccccgccccgcgactacaagtcccatcgcgccccgcgctcgcgcacactacgccagaacaagatggccgacgcggcggccacagctggggccggtggctccggaacggtaagggcaggaagcgcgggctcggagccgagagagtttgggtatcctgcaactttcccctcgactgagcaacaagataatgcccagaaattcagccccatcatgagctccgactggcggagggtgttttcaggccgtaggcgccccctccttgggacttggctgcggcctccggagttggcggacctgtgtcttgattggctcgttcgctgttgggggttgggagcccggaacacccccgattggtctgaagatgccgttttcgccttcttattggccggccaaagttgaaaggcattcccgtttcaaaatatttagctttcttacttttttgtgcttttatcttttgccctcctctcctcgcggtcacctcttgttactgttttcattttccctttcaatgaaatggtgtgaagatgggaggcacaagagagggatcctgttttttctgcgggacacgtcttaatcccatcatgcgtgtttcttcagctatgtattctaataatctgctaaagtagaaagtaaaagacctgctattttatctcattgggactgtacgttttaggtaagcggagaagtggtctctgtattta

SEQ ID NO: 34 - DNA, 2508 bp, Homo Sapiens
ggagaggttggaaaaatgagctttgaaattgcagtctcataaaagcaaaactgagaaaagatacaacagtgatggagaaagccagacgggcattaaaaaacaaaacaggagtctctcctaggccgcgcctacacgggctcgccgcgctcgctcgtcaccaccgacaccccaccccctgccctccgcatgggaggggcaagaacgcgatccgttcgcagcttccaggcaggtgatgaggatagctagtcccgcggtcctccgctagctggcggcgggggtcggccaggtgcccggaccctccgagggccccaccgccgcgcgtcccggggatcgggaccgctacccgcgcctcacctgcgcgcccgggccccagggccctgctcccgggcggtggcgcgggcctggctcccgtcgcagccacgaccgcccccaccgcccccgccgtccccgcccgggaagtggcgagccggtccggcttgccccgcccgcctcccggcccgcactcacgctccacatcgtgcagcttggctcgctcctcctccagcttgcccttgaggctctcggcctcgctcttcagcgacgccagcgtctcgttctcgtgcagcccctcggttgccatcttcgcgcggggacgcagcggagagggaagcggagagcgggaatgcgctgagccgcggcgggcgccgctccagcagccgtccccggccccgagcaccgccccgcggccccgccctccgcgatgacgccagcagctgcgggcccggctgctgcgcctgagccccaagaccccgcacctgggcgcgcgctctggcgcagtgcctggtgcgatgtccgcgtcagcctctctcctccgggagaggcagggagtgtgacgcccattttaccagcgggcaaactgtggcttagggatgctgggtgatttgcccgaggacgcacacagagggaagggccaagccgggattccaactcgggactccccgcttctggggagaccggtgaggcccccgcgacatggccctcccatccccaagcctctcgtgcagatctccgctctgtgggacttgattgcgggctgcgggcccgtggctcctgcaggcagagagaggacgggagaggagacggctacgaggcttggccgcaggtagctacggtgctcccccaacaaggaaccggaaaccctcttcgtttgttgatctaaatatacaaaaataaaactagttgctgggttctcagacggagtctctgcggcattaggaggcccacccttattttctcttttcttcacgcaggaatcaggtccctggcctgggggcggcaaaaggagatggcggtgggtcaagtgggcgcgcaggctcagacctggggcttctgagcccacgcccaggcatctcggacctctcacttctgaggccacctcctgccctttagaatgaagggctggcacagttctgccaggatgcacgtttagcgacttctgtcagactgaagcatcccctctccgcaagcgcctgaagtgtgagaggcactgttctaagtgctttaatttgcacttgtttaatcctcacaggagtcaacttgaatgggcacacttattcccactttacagaagaggaaactggggcacagaaagactgagtaattgctcagggggcatgctccaagaaagagggagagacaggatttggacccagacaggctggctccctagtgctctggactttggtgtggatgatccaactcaagccttctcctttttccctcctatgtgatcttgcatgcgtttgtgcagagaatgagaaggcagatcaaagttacagatgctgcgagaacatcgccaagcagaatcttgggtgctgtccccacctctctgtacctgctccctcccagagaagccagcctccacttgctgtcccgggccttctctatctgagaaaagttgaaggtactcgatgttaatctgtacatagttgttttgcaggttagagtctgggatcctccgtttccttatctggaaaagcttcttcataggatctgcttcataggattgttatgagaattaagtaagatggtgtgggccgggtgcggtggttcacacctgtaatcccaacacttcgggaggccaaggtgggtgtatcacctgaggtcaggagttcgaaaccagcctggccaacatgatgaaaccctctctctactaaaaatacaaaaattagtcgggcgtggtggtacgtgcctgtaacctcagctactcaggaggctgaggcacgagaatcgcttgaaccctggaatcagaggttgcagtgagccgagatcgtgccactgcactccagcctgggcaacagagcaagactcaaaaaaaacaaaaacaaaaacaaaaacaaaacaaaaaaaggtaagatagtgtgggtgaagactttagcagacttctccgtacatagcagatgcttattcactgctagttctcttttccgttcccatccgtataataataggtttacttgtcgctgttcc

SEQ ID NO: 35 - DNA, 2535 bp, Homo Sapiens
acaatggcttcttggaacttcttggaacaaacaagacaaaccaacacattagagccggcagcgggggcacaccgtgttcttctagaaaaggatcaaggggagtggcttcagtaacggaacatgagggactccctcacatggacacaaagcatcaagggacaggccggctttgcttttcgcttcttcctagctgcctaattaggacttactcagttcacagtgttctaccttaccgggccctcttggagccagctggagatgataaaaaccacacaggtattggagtcagatagcttcacatgccatttccacctgagaaacttgggtgagtcacatctctccaggcctcagtttttgcatctgtagaaggaagagaagacaacctatctccaaagcgttgtgacaattcagtgagatgatgtttgtcaagcccaccacacagggcaagttggttccttcccgtcccccgcatttgcctctactgagggtgaaggcagcagagaagacatcaccagcagctgcccaccactgcctggctctggagagggagggaccacgcatcctcacctaaccacaccaggccgctatcgcctgcatgtatctcgtgtccaatcggggccctgaggcagcgtcccgccctccctggaccccctcagatatcccaggctggaatggtgaggggcaggtgggagcagccaggcccttccctgggcaagccgtggtgagccacccgcccattccgcagcgggaggcggccgggcctgggggccccactgctagggcccgactcagagggcagcccggagtcgctgggccgcaccaccacgaagacccgcctgtgcagaagcccgccgggccgctcggagtaggcctccttgtggctccccgacgggcgcgggcagaggcgggcgcggaaggcggcctggaagccgcggcggaagttctcgttgaagtagccgtagatgatggggttggcgctgctgttgaagaaggccagccagtgcgcgaaggggaaggcgtagacggtgaccaggtgcagctgcggcgcgctgagctgcccgtagtcgatgagcagcagcagcgcccagagcggcagccaggacagcgtgaagaacagcgccaccatgaccagcatgtgcaccacgcgcgctctgcgccgcgatgctcgcgggtccgcagcctcctcgcccccgggggccgggcccggggcctggcagagcttgcgcgcgatgcgggcgtacatgaccacgatgagcgccagcggcgccaggtagatgtgcgagaagagcacagtggtgtagaccctgcgcatgcccttctcgggccaggcctcccagcaggagtagagcgggtaggagcggttgcgggcgtccaccatgaagtggtgctcctcacgggtgacggtcagcgtgacggccgagggacacatgatgagcagcgccagggcccagatgacggcgatggtgacgagcgccttccgcagggtcagcttctcgcggaaagggtgcacgatgcagcggaacctgccgcggggagagagacaggcgggatctgggtgggtcctagggcccctgcgaggggacggtgggtgggatgcgggcacctgaccttcatcatcgcatctagggcggcgtcgaagaacagctcagacctgaattggctgagtagtcaaagaacaaaggcagctacaggatttatgagaagggaggaggaaaccgcagatcgtgtgggaacaatgaatcctgtgtgcacttttgcacttttctccttttttttttttttttcctgagacagggcctccttctgtcgcccagtctggagtgcagtggcgcgattacggctccctgcagtctccacctcccgggctcaagtgatcctctcctcccacctcagcctcctgagtagctggaaccacaggaatgcgctgccacctcgccggctaatttctttcaatttttggagagatgaggtctcactgtgttgcccaggctagtctcaaagtcttgggctcaagctatcctccggcctcggcctcccgaatttctgggattatagatatgagcctccttgcggggccatttgtgtacttttgggggtcaactgattagctggcagctagcagagcgatcagagtgcgcagtctgtcctcgacaaggacgattaggtgcgtcaaataacacagtttctgtttatggattctccagaaaacctcaggaggtcagatgtagagcctacatgtcaggctgtccctatgtcatcttggccatagtatcagtatctctacaatgcaaggacaagtctgcaccatttatttcctcatgaggacaactcagcatctgttattacaccctttattattttttaaaggtgaggcctttaagatagttactacactgttgatttacagacaaggaaactgggactcgagtgttaagcagttggctcaagttcacatagcaagttgcaaggaccagtcttgaacccagatttgtcttgcttcatatgccatataaaccagtagctgtaaaccctcca

SEQ ID NO: 36 - DNA, 2346 bp, Homo Sapiens
gacctcatctcaaaaaataaaaaataaaataaaattaaaaagtcaataaaaataaaaaacggccaggcgtggtggctcacacctgtaatcccggcactctgggaggccgaggcgggcagatcacctgaggtcgggagttcaagaccagcctgaccaacatggagaaaccccatctctaccaaaaatacaaaattagccgggcatggtggtgcatgcctgtaatcccagctactcgggaggctgaggcaggagaatcgcttgaacctgggaggcagaggttgtggtgagctgagatggtgccattgcactccagcctgggcaacaagagaaaaaccccatctcaaaaataataactaaattaaaaaataaaaaataaaaaggcagacacctgaagacacacgggatgcacgttggggaggtcccgctgccaccccctgcccccagccccgcccacaatgtgcacttgggggcccagaggtggcacagccctgcctgcttgggcaggagggcctggtgctgacttggtggggcctggttcccctgagcatcccccacaagggcctgactgtgggtgaggggcgcagggagcagtcggccccaagctgggcactgccctgtgagcctgggggcagcccagggccccccagaccacactgcccaggccggggctggcctcgctggctgagtgggcctctgtctccatgggaccctgccctgcagctgatctccaaggccaaggaggccccagtggggtggggcctggccctggatgtggctgacgtgtgttggggctgcctggggcttaggcgctgtgtttcgtccccaggagctggaacagcagctcatgatggagaaaagaaactaccgcaagaccctgaagttctaccagaaactcttacagaaggaaaagaggaacaaaggtaaggcccctgtgggcacaggtccgagaccctggctgcaggcagcccggcccccacccactctgctccacccacaggttccgacgtcaagaccatgctgtccaagctgaaagggcagctagaagaaatgaaatccagggtgcaattcctcagcttggtcaagaagtatctgcaggcaagtgggctccgggccccgctctgccccgtgaggcagtagcttcagacgggcctcccactgttggatgctgtaaatctgtccgtgtgaagttataaaaggggccctgatttgagggtccaatgccaggaagccctggggcgaggggcagagtgaccaagcgcccgtgtcccgctccggcaggtcatgtacgcggaacgctggggcctggagccctgcaccctcccagtgatcgtgaacatcgcggccgcaccctgcgacacgctggacttcagccccctggacgagtcctcctcgctcatcttctacaacgtcaacaagcacccgggcggccggcagaaggcccgcatcctgcaggccggcacgccgctggggctcatggcctacctgtactccaggtgcgttgggagaaaagctcacccggaaaaggagacgtagcccggggtgctgagaagagggggggaacgtgccctcgccagtcagctaggctgggtttgcactttttagtttagagaaatgtttaatcggggtttaggccaatgtgcactaggtgccaccggcagctttgcagagccctggccagagtggcctccgccgcctgtgggcctgggcaccaggtctcagggtgcgcctggtggtccccggaggtgctgcggaaccgccctacataattaacacacggaatggcttccaaaaataacacgcacaggcagctcggcgatgtggcctggactccatccaactcaccgagtcagaacacccggggtaattagctccagggacgggtgaggctggggtgtttctgcagccccctccactcggtgtgcacactggctcaggagacccctgatccgtaaacgctggtgtgcgtacgtacgcctgcagcagggaggagccgccgggcccactcacctccaccagggccacagggccagacccccggccgccccaccagcccccttggcccttcacccactctggcctgcatgggcccctgggctgcaccctgttctcaggcactgggagctgcagcaggctctggacccactggtctgaccagctcccagagaggccaccctgccagtgactggggccaaccccatgttggcttatgggacccttatgacaccaccttggagccccaagggtcctctctgagcagaggccatggggcccagcaaaggacgccaaggaggacagcagggagccagggctctcagcagccagtggggacaggcaggcccccagaga

SEQ ID NO: 37 - DNA, 2196 bp, Homo Sapiens
ttccctttttttttcccccttttaccagtcatactggcttactcagaaccctacaaatcaatcctgctcattcttaattttccaacattgttcctgagattgtttcaccagaaaagttctcccccttatccacttcgcctaacaatttctacccatcccaatcctcctgcatttattgcttccaggaatttggcacttaggacacccttgtccttacattgttcatgcatgtatatttcgtcttcaataaaacatttagttgctcaagggcaagggtcccatagagtctcaatatgctaacggcctggtgttgcttaataatttagattctgacgggtcctctccagggaggggagcaaagggcaaattatcttaggggctgggagtgcagaagccaaacctttgagactgtgaaaagaagacggcgccgagacgattcagtagcaggcattcaagcaagaaaaactcaaatattgttcccaataatgcctgactaatgccaaataccaagtaagggcccaggcagtcctgacagcctgcagtgccccaggataaaactaaccctgaggggtgctagcccacgataaccccctgccagggctctggacacgccctgtctcctcgaaggccaacgggctgcccctgcgcgccgaggccccgccccgcggcccgccgattggccccagccgccccggcgctaagactcaatttcacactacgcgcccaggccacgcccacctgtcatgcggccctggaaactgtgagtttggggattgttgtgtccactaaccggactcagaagggacttccctgctcggctggctttcggtttctctgctcacctccggataaatcacggggtctcccgcgccgctcatggcgcctcccgtccgtctcgagcgtccctttccttcccggcgctttcctgggttgcttctggcggccctggtgttgctgctgtcctccttctccggtaggaccccggggtggattcgcgcgtccgcggcgaggctagagctctgctcagtcagtcgggcaggaggcgcggggcgaagctcactgcacgtcgtgcctgcttgggatagagagcgaggccagggttctccgaggggtgccgtgctcagatcccgggggtatgtggcgggggatgcgggaaccacgcagaagcttgtttggtggcatcgtgtgcgcggccgacatttacgcaggatctggctgcgttcccaaaagaagcgtgaatcgtgttttcgggattgagcccagtcagcaaggggagggcttactgggcgccccaggtgagggcttgctctggagtgcacaggtgcgtgggattgttgctagagcccgtgctgtgcccgtggtgagagtttgccctgtgttcccttggtgccttggtgagtagggtgttcattagggcttggacagtacccgcggtaagggttgcagtgcgtctgctgtgccccatgggctgggctggcctgggctgggctgggcgagcaggggcctggccaggtgttgctgggagcgtgctgtgcgcaagtggcctgtgtgcggagttcactgtgggcaagacagctcactgtttgctttgagtggagcgagcgcggactctgcggctagggagggcatgttgagtgagagcaggctctcagtgcctggggttagagaggtggtaagggcgcaccatgcttttagtgccttctgtgaacagtgtccgtgttgcctgagatcgtattggtcttgaattttaagtggctgcttttttggggggtgggtgggccatcgagtcatcttcctgttcccaaccaatatagacagtatctgattccattgcctagtggctttttgacattgttttccttcttttcattagtttgagtcatatttgagagatgtgaagcaacctaaaaaacactggtagccaaacctagtgagaaattagtatcctaacaaaggaaggcagataatgttaatcttgttttcccctacagctcataaactgaagcttaaggcctatcccactgttttgtatttcattgaatggaatcaatatttttaaaaatgcatgctaggccaggcccagttgctcacacctgtgatcccagcactttgggaggcccaagttgggtgattgcttaagcccaggagttcaagatcagcctggacaacatgtcaaaaccccatgtctacaaaaaa

SEQ ID NO: 38 - DNA, 2355 bp, Homo Sapiens
gcagaaaacccgggtactagtagcaagatccgggagacatctaaccggaaagaaataaaaaaccattagtttcccgaagccattcttattctgaacgctgttcgttaagagaatcatttactaaagctctcttgtagtagcctttacaaaagctttatttcattcagtaagaaagcgccccgtcccaaatctaaataaaccttacatagatgaggctccggaaattatcagcttgattctttatgaagatagttagaggtggataaatcaatagactcgctgaaacacccaccttctgcaaacaggcctgagaattaactaatcagaagtggacaaaaagtagggatttcagaaagatgacctgacacatcccattgatcttccctggaatgcgacccccaactccttattaagagtccaaaatggttaccagccaggatgggtctgggtgaggaatcgaattacaacccacttcaatcctcgacctggtcgtttgctgttattaggagaaatggggcagagagggagggcaccgctcacggagcctcatttcgcatgctccgatcccctctcggcgtccctctactccgcccctaccctgaccgcccgcgagggagacgccggccgatggacccgcatctgccctcacctctcgccttccccgggcgatccctctacagtcccggacccccgagaaaggggaagggagacgtgtgcacacgggggcttccgggaccgcggtcctgcagttgccgctccggtccccagcgctggccggcgacccgaggcgcggctcgcacctacctgcagccccgcttcccggtggcggcaacacctagcgatgctcctgcagcttttgcgggccggcgccagccttatcgctctcgcatcgcttccaagatgccaatccgccgtcaccatccaggggcatagggaaccgaagtctggtgctgtgtgatcgtggagggcggcgtgtgagtgtggccctgagcgtgcgagtgtgcgcgcgcgtgtgtggatgtgtttcctcctccgatggcaaagacggttcaggaatctgacatccaagctggaatccccctgaagcgggtgaaggtgagcctgatccttctccccgcttctttattccacagtgtcaaagtaatcaaaagatttgtttactgaggaaaagccaaagtcccgcagcccttggcagcgcccgcggtcgcctcctgtcctcgccggatgcgcgcggtgcgctcagctccctggactgcaagaatcaaggcggtcttgctgcaattaccgctcttattccatctctgatttgtttgcttttaaggccgactaaagacttttcctctcgcctcacgtcgtctctccctctcacacacacacacactcacacatcctccgttccctctctcccgccctccctcttgttctctggggaaaggcaattggacagaatgattcaccttcaggaaagcagcctcggccacgcacttctcgagttccctggctctcgcaggtaccgggtctccaacgtggcggagttgctgggaagctcgggacaggaaggaggagaggctctgagctcagccgatgtcccccctccagacgcccgcgttcctccgtccaggtgcccctgttcccactgctcgcagataggtccccgctggtgccctcgcggagacttggcgccttccactcgaatccacttagcagcaactcctggccagcttcagcccctcaatcccgcctcgaagtgctgcgggcagagccccacgcagcccacccgctgcccttctaggcatcgtgggctggaaggaagggaaacccgccgatgtccccctggtagcagtgccctggcaccgtcaccaccgaggaggtgcgagttccaacatcgaacacaagcgagcaggtgtcgcctgtgtcactttgctaaaggcgggaggggagaaagaaaggagcggggggagggggccgaggaaacaaatccagatcaccggcggagaaagaagccgtttagcaagcaaagcctcctctccgcgtcccaccccagatgctatactgtcaaaagacactgatgctaatcttttagaaagtcgccataaagggcagagcccctgctccactctagaaccctattccacccagcctggctgtccagtgagtacagagtgacttggctcccccgtatagtgcagcgagaatgcaggagaataggtcctgacactccaggttgagttaagcagtaaaatggaatggcagggccgggcggcgttgcctcgcctctctctcccaacagccagttctgttagccccagcaactgccgttgagagcaaacaacggtcctgcagaaaaagaacgag

SEQ ID NO: 39 - DNA, 3404 bp, Homo Sapiens
ggcccgagaacgtttaatcggaagccgctctcaagtgatccgtgcgtctctcttctgctcggtccgctctctggttaaaccctcaaaagagcgcgtatcccttcccgctcggagcagagtgccgacctccctttgcgcccgcggaggcgcagtccctcggctcacccggacgctgggggccaggcctaggactccagggctccgcgccccggagtcctgtgggccaacaggtgatgggagaggggctagactgggggcgcgccctgacagacccaggcaacgaccgcgcgggcaaaggctggcgtcccggggctggggcggggccgtcggaggggcggggcgggggctgccagacgggcgcgccagccgcgccaagcatccattacgcctctgccagacctgggcactccagggagccggtggcgccctcgctcgagaaggagtcgggaagaggagagtggctttcgggaagaggagagtggctttcgggaagcatctcctctgaggaagaggcggcggcggcggcggcatttacggagagaaaaagtaagcagctgcactttgccttcaagcgtcagactctgacacgcgctccctgtagcgatgataactgaccaacccgagagaacgtgcacaaggaaagtgagggaagggggtttcttatcttcctctagccacccccaaatgccccaggaggcccggcacctgcttcaagcggttcccagcgctagcccttgggtactgcgggccgcctcggggcttgtgaactcctagaacgccagctcttggtcgccgctgcgccctagaggcgtcgccgcctagaagccgggcgcactcgccgcccgccagccacagatcaccaccctccctcccatcacccccgcgccttttatacatcacacttctgcatctaaagaattcaggctcttagaatcagaatcctcttcacgtagcttgcacccagaagagcaaagagaactagacattctggctgcaggaacctctccccctagtgatgcagttatttatagcccaaactccagcccgagtctgcgtgtgttcgcgcgcggggtttcgccgcggcggtgcaaacttttcctctggtccgctattccagaggaatcacagtatgccagggctgaaggtttctgatcgctaacgtcaggggagtagaaatgtggttttggaggggatgagcgtgcgtttctagcagatgtccgtccttctgcaaacgcgtaaccgccagcttggaggcacggggttctctgaatgggttcagcatctatacaggttgcagatgtggaaagtggggtcagaaggtcaggctgaaagaaggactagaatttggcgccgggtttgaggggggcttgagcgaactaagaggagtgcacgatgagaataaagaaaaggtgcactaagttttcagaaatagatgaatcaaggacctatatgtaagtcccctcaacaccccgcccgataaccaccatgacctaaatttcataacagattcctctccctctacacatcaggaataagtaattatttctcttctgcttttaacagatcgaaaaatgaaacttagatacacagcctgaaagaccaggggggcgacgggatgaggggggttggggatgggattgtgacactgctcaaaagcaagagacttccattgacagggtttatttttccccagctccaactacaggcaccgaaaggtattttaccttctgtcaaaggttcaaagaaggaaaacataaccatatacaggcgtatctgtaacagcttgccaaataaaacctgccttctcctaccagaaccaaccctcagggttcaggtctttggcaaggattgggcactcggattcctcaattgctgcactatggggcaaataattggggactttgagtcgcccaggcggcatccttacaaattgcacagctccagcccgccccctgcctccacggcccgaccaagcccgctgggctgccgctgcccccatgaccgctgggcccgacgcgcagcgcgcgctgaatggagacatccccggccctcgggtcgcgcgccgcacgccgcgcttcacctccgcggcgttattgttccgtgctggcggccgagcgccaaccgcaggaccgcgccgccgcctccgacgcagtgagcacttcattagtaacccgagctttccgagctcatcgaagtctcggtccctctgggaaggctccgggctcccgccactcgccggcgggctggcggagacggtaggggctgcatttcccagtctccaacccaactctggccgcagctcccacagaaggcgaataaggagacaaggaagaccgagctagagagagatgtgacccgcctgaggtactaagaaataagctcgccggcagttcctccaaccccaccccacccccgttgctgctcacgccctccagactgcccgcgccagaaatcccgcacccgtcggatggacggctccgggcacagggctgtaggcggctcggaacagccctggttcgcgctcgctggtccgccaggagcggcctcagcggtgagggggcggggagccggcgggggagggtcgcccggcgccggaggcgcggccggcagcgccgcggacgagctggcttgtgcaggtagacatctaaataaataagtcagaacaaactttgctttcccatcaccttaccttccttcgcagcctgcgcctcccctgtgtgtgcaaagcggagcagccagatgtagcataaaataatccatgaagggtaccgagtttgaaaaaccatggtgcatgagcaggttttattttaggtttcagttatcttgagtcgtggatttttaaatgctgtttgttccgaagtagcttttgttttattgtgctccttgcatcgattccccttctcggtccccgatcggctgctccacgtttagctttttttaatttcccccccactcctgttcgctcgcaccgtgtttgctgcctgcaagtctccgactgcagaccggccgcttgctccacactccaataatatcaattagggggggagggggcggggctccgagctgagagcctccgccactcgggctgagtggcaggcacagccggcctgccaggaggcgattcccagggccaaggggcgggtcccggcgaaatggccgccccggccacgggggcggggtccgaggcaggagccaatcggtgccgagcggagtcaggttgctggtccaggattccctccaggttctgagctcgcgctggatgttcagaggagaacgaggatggtagccgaggtgtgtgctgctttggacgctctgcttttagcaaccgcagctttcgcgtagcagaataaatccgagaataacgctcccaacttacactcttttctatagctgtactccgcgcg

SEQ ID NO: 40 - DNA, 2475 bp, Artificial Sequence
  chemically treated genomic DNA (Homo sapiens)
gttataaaaaggttaatagataagtattttttaagtaataaagttttttttattatatgttataggagttattgagtgtttttgtaaagaaaattagtattataaagtagtaaattataagtgatgtaaatattattttttgtagaaatttataggaagggaagttaggtagaggtatgtttttatgttagtaggtggggatataaattttttttttgttatttttttagaagaaagttagtaatagagattaagagcgtaaaaaaaaaagaaaagaaaaaagaaaaaaaaaattatttcgatttaataattttatttttaagaatgtatttttaggaaaaaaaattagatatttgtttaaggatttttgttgaattttttttataaggttattatattattaaatagaaataattgaaatagttaagttgggttatattatgggatatgtttatgatggtattatatttaagtgacgtttttgaagtacggtagtgatttttggaaaaggtttaatatattattttaatgagacgtgtaaatttattattacgatatattaggagaaatgttttgatagacgaagtgggaataattgggagagtgaatgatggagtgttaggaataggggtatatgagttgggttttttaggttgtggaggtgttttcgggtggaagagaaggagggattaagcggagagttttaagttttgaagataattgggaaggtaatatattttttaagaagggtatgtagtagttatattttttattcgttacggttagtaaatttattgtgttttttggagtgagttgggttattaagatgggtggtgtttttttgttggggaagaggggttcggtgggaatttttgttttaaggtttggtagtaacgtttttacgttgttttgggtcgtaggtttgttaagtttttcgttttcgtttttttgcgcgcgaaataagttttagggttaatgtggtttttttatttagtgttttcgggggcgttaaaaaacgatttgtttagatttttagcgtcgacgttgcgtataagcgtagttaattgttggattcggtcggtgtgaagttttatatttaaaaggatgaagggtatttatttggtttaagagaacgatttttaggtaaagggttagatttaggtgaggagtcggtatagggttagaggtgttttgtatatttagagttttttttttgagttttttgttttgttcggtttttttgggtcgtaggcgtttattttgttttttggggtttcgttgttttttttttgttaggttttttttatagtaacgtttttttttttttttttttagtttttgagtttttttttttttttttttattgttttatttttgagggatagaagtggggtggtttgagagtaggagattggagggaagaagtaagtttaggtttagttgtaagtattttttattttcgttttcgttttcgttttcgttttcgttaggttttaggatatttgatttttgttaggttttatacggtttggtttgaagtgttttttttttaatagttgtggatcggcgaggtttaatggtttacgtttgtaattttaggattttgggaggtcgaggtgggtggattatttgaggttaggagtttaagaatagtttgattaatatggtgaaattttgtttttattaaaaatatagaaaattagtcgggcgtggtggcgtgtatttgtaattttagttattcgggaggttgaggtaggaaaatcgtttgtatttaggaggtggaggttgtagtgagtcgagatcgcgttattatattttagtttgggtaataagagtaaaaaatttcgttaaaaaaaaaaaaaagaagaagaagttgtggagttgtttgatttttgattttgttcgtttaggttggggtcgttttggttttttaaatttagtagtgagtttggatagatttagaggtgtttattttaggtaataggagttttagataaaattaggttttttttttggtttagatttttttttgtttataatatttttaggatgtgggatatttagaggtttgtgtagttggaggatgttgggaaatgtgaggagaagatgttttttttttaaaattggaatttttttgattatttgaatttttttgttagttataaattttatttatttttattttatttttgtttttttgttatcgtttatttgtttaatttttgaaggtagtgagttttttgttattggaagtgtatttttcggtatttttatttgtagaagtttttatagatgttgttttttttttggtttagattatgtttattgtgaaggaagtagtatatcggttgtttaaaagtgagatgagtttttatgtagtgttggattttaagaagggcgttttatttgaagattttaaaaaattttataggtttagattttagttttttattgatttttggaatttttttttta

SEQ ID NO: 41 - DNA, 2475 bp, Artificial Sequence
  chemically treated genomic DNA (Homo sapiens)
taagggggaaattttaaggattaataaagggttgaggtttgaatttgtaggattttttgaagtttttaggtgaggcgttttttttaagatttagtattgtatagaggtttattttatttttggatagtcggtgtgttgttttttttatagtagatatgatttgagttagaggagaagtagtatttgtgagaatttttataagtaagggtatcgagaagtgtatttttagtgataggaaatttattatttttagggattaggtaggtaaacgatgatagaaggataaggataagataagagtgagtgggatttgtggttagtaggagaatttaggtgattagaaagattttaattttaaggaggaaatattttttttttatattttttagtattttttagttatatagatttttagatattttatattttagaggtgttgtaagtagggagaggtttaagttaggaaaagagtttgattttgtttagagtttttattatttggagtaaatatttttgggtttgtttaagtttattgttgggtttgaaagattagggcggttttagtttgaacggataggattaggaattagatagttttataattttttttttttttttttttttttgacggagttttttgtttttgttgtttaggttgaagtgtaatggcgcgatttcggtttattgtaatttttattttttgggtgtaagcgatttttttgttttagtttttcgagtagttgagattataggtgtacgttattacgttcggttaattttttgtgtttttagtagagatagagttttattatgttggttaggttgtttttgaatttttgattttaggtgatttatttatttcggttttttaaagttttgagattataggcgtgagttattgagtttcgtcgatttatagttattaagagagaaatattttagattaaatcgtgtgaggtttaatagaagttaagtgttttagagtttggcgggggcgggggcgggggcgggggcgggggtggggagtgtttgtagttaggtttggatttgttttttttttttagttttttgtttttaaattattttatttttgttttttagaggtgggatagtggggagaggaggaagaggatttagaggttggagaaggaagagaaaaggcgttgttgtgggaaagatttggtaaggaaaaggtagcggaattttagagagtagggtagacgtttgcggtttaggagaatcgagtaaggtaaggagtttaaagggagagttttgagtgtgtagggtatttttggttttgtgtcgattttttatttgggtttggttttttatttgggagtcgtttttttaagttaggtgggtgttttttatttttttgggtgtgaaattttatatcggtcgggtttagtagttgattgcgtttgtgcgtagcgtcgacgttgagggtttgggtaggtcgttttttggcgttttcggaagtattgggtggggaggttatattggttttgggatttatttcgcgcgtagggaagcgagagcggagggtttagtaggtttgcggtttaaggtagcgtaggagcgttgttgttaggttttggggtagggatttttatcgagttttttttttttagtaggagggtattatttattttgatggtttaatttattttaggaaatataatgggtttgttgatcgtggcggatgagaggtatggttgttgtatgttttttttaagaggtgtgttatttttttagttgtttttaggatttagggtttttcgtttggttttttttttttttttattcggaaatatttttataatttggaagatttaatttatatgtttttgtttttgatattttattatttatttttttagttgtttttatttcgtttgttaaagtattttttttagtatatcgtaatgatgagtttgtacgttttattaaaatgatgtattgagttttttttaaaagttattatcgtgttttaaaaacgttatttaaatatgatgttattatgagtatgttttataatgtaatttaatttggttgttttagttgtttttatttgataatataataattttataaggaaaatttaatagaaatttttgaataaatgtttaatttttttttttaaggatatatttttagaagtggaattattgggtcgaaatgatttttttttttttttttttttttttttttttttacgtttttgatttttattgttaatttttttttggaaaggtagtagaaggaggatttgtatttttatttgttggtatgggagtatgtttttatttggtttttttttttgtgagtttttataggaggtagtgtttgtattatttataatttattattttgtagtgttggttttttttgtaagagtatttaatggtttttgtaatatgtagtagaaaaagttttgttatttggaaaatgtttatttgttaatttttttgtagt

SEQ ID NO: 42 - DNA, 2229 bp, Artificial Sequence
  chemically treated genomic DNA (Homo sapiens)
ttttttttcggcgttggttggtgcgggttggggttaggtggagaagtcgttttttgttaaggtgatagaacgtgttgggggtgggggtcggggttagggtcggtgtaattagggggtcgttgtttttttttggatatagtggaagtttttttcgtattattaaatttttgttattttttttgagggatttgtttttaggtagtacgtaagttgttgtttcgggtttatttcgtatttttttattgggtgaggaaggagtattttgaatggagatgggggtgttttcggtttatatatttgtagagaagaggtgtgtcgggttgtatttttggaggtcgcggtaattgatattagagaagatttcggttgtagttgggaaggtttattggttggaaagaggtgttttttttttttagtaaagggttttgtttggaagggttgttttttatttgtttagtggtattataggacggtcggtttttattcgaattttttcggacggtattattatatagtcgggttttcgtagtgttggttttttaattcgatgattgttatttcggtgaggatttgtgttgatggtcggagaattttgcgttgcgggcgtatatggttaggtggcgtttggtaggcgacgttcgggtgtaggacggcgtttttatcgttttattttaaatcgttgtttgggtttaggtttttcggttttttgaataggggtttggggggttaaggacgttgaggtttcgggggtaggaagttttttttggttaagcgttttttttttttttcggtatatatttttttatttatttatttcgtttattttcggggcgagaggtttattaaggtagggcgcgttttttttatgaattattttaaggtttttgagtcgcgggggtttcgggtaattatttttttttttttttggttttaggtattttagtttaggggtttgtagagaagttcgaagttcggataaacgcgtcggacgttaataattttttatttttggtagtagtaaaggttaatatatttttattttttattttagtttgttattaaaataaagttgcgcgcggttgagggtaggaaggcgttgagatcgagaagaagggacgtttcggagaaagtgcgtttagttgattttagaaattagagtttttcgggatttcgtcgagattttttgtagggcgttttaatttgtttttttattgcgtgtcggcgtcgtagcgcgtgcggtttagggtttggtgatttcggtttagttcggcggtcgcggcgaggtttttggcgtagtcgtttggaatttcgtattagaatcgggatcgcgtaaatgttttggttgaagtgttattttatttaagaaatattgttgttaggaataaaatggggttttcggtgtttcgaagtattttttgaaatttttttaaaataatttataaaaaatgtttttgttttaacgttttataacgtttaaggaaatatgtaaatggtttgtttttttatcgagatggtcgttttaattaatagtgtatatatatataataatttttttaatttttttttttagagttaagtattttattatatgtaaattataataaagaaaagattgtgtaagattatgtaagtcgattgatttaaaatattgagttttaatttaggttttttgtttttttatttaataatttttgtgtttggattagattggtgaagtaggttatggaaattaataaagtaaaaaattaaaagtattttttttcgttatttttttttttaaaattaaataatagtcgtttttttttgagtaggttttagttttaggttcgagtttttttgcgattattttatagttatttatagtagttgttgttgtttttgtcgggttttcgtttttgttttttttgggtcgttttttgtatataaaatatattttagttttttaattaaatttaaatacgatttcggtagaatttatatatttcgtggtgtatggattgtgtcggtgtaggggaaataaatattttttggtatttaattattgagtttaattcgaaaaatcgggattgggtttttaggcggtattttaggggttttaatttggttcgcgtttttttagattttggcgttgagagcgttgtttttgcgggtgggtggacggagaggtaataatttgtttttaataaaaatttgtcgttatcgaatcgaaagcgaaagggaagggagaag

SEQ ID NO: 43 - DNA, 2229 bp, Artificial Sequence
  chemically treated genomic DNA (Homo sapiens)
ttttttttttttttttcgttttcgattcggtggcgataggtttttgttgaaagtagattgttattttttcgtttatttattcgtaaaagtagcgtttttagcgttaaggtttggggaggcgcgggttaggttggagtttttggggtgtcgtttaggggtttagtttcgatttttcgaattagatttagtggttaaatattagagggtatttattttttttgtatcgatataatttatgtattacgaaatgtgtaaattttgtcggggtcgtatttgaatttagttagagaattggggtgtgttttgtatataagagacgatttaaagaaggtagaaacgaaaattcgatagaagtagtaatagttgttgtgggtgattgtggggtgatcgtaggaaaattcgagtttgggattgaagtttgtttaggaaggggcgattgttgtttaattttggagggagggatggcgaaggaagatgtttttaattttttattttgttaatttttatagtttgttttattagtttggtttaaatataaaagttgttaaatagaaaaatagagggtttggattaaaatttaatattttaagttaatcgatttgtatgattttgtataattttttttttattataatttatatatagtgaagtgtttagttttgaggaggaaagttggaagaattgttatgtatgtgtatattgttagttaggacgattatttcgataaagaaatagattatttatatgtttttttaaacgttgtaaaacgttaaagtaaaaatattttttgtaagttgttttaagaaaattttagaagatatttcggagtatcggggattttattttgtttttgatagtagtgttttttgaatagggtgatattttagttagggtatttgcgcggtttcgattttaatgcgaagttttaagcggttgcgttaggaatttcgtcgcgatcgtcgggttaagtcggagttattaagttttgagtcgtacgcgttgcgacgtcggtacgtagtaggaaaatagattaaaacgttttatagaaaatttcggcgaagtttcggaggattttggtttttaagattagttgggcgtatttttttcgggacgtttttttttttcggttttagcgtttttttgtttttagtcgcgcgtagttttgttttggtggtaaattgaaataagaaatggaaatatattggtttttgttgttgttagggatgagaggttgttgacgttcggcgcgtttgttcgggtttcgggtttttttgtagatttttggattggggtgtttgaggttaggagaggagggggatagttgttcggagttttcgcggtttagaggttttgggatgatttatggggggggcgcgttttgttttggtgagtttttcgtttcgagggtaggcgaggtgggtgggtaggggagtgtatgtcggagagaagagagaacgtttaattagagagaattttttgttttcggagttttagcgtttttagttttttaaatttttgtttaggaagtcgaaggatttaggtttaggtaacggtttggggtggggcggtaagagcgtcgttttgtattcggacgtcgtttgttaggcgttatttggttatgtgcgttcgtagcgtagggtttttcggttattagtataggtttttatcgaggtgatagttatcggattgggaaattaatattgcgaggattcggttatgtgatgatatcgttcgggggaattcgagtggaagtcgatcgttttgtggtgttattagataggtgagaagtagtttttttaaatagggttttttgttggaaggaggaggtatttttttttagttagtgagtttttttagttgtaatcggggttttttttaatattagttatcgcggtttttagaggtgtagttcggtatattttttttttgtagatgtataaatcggggatatttttatttttatttaagatgttttttttttatttagtagaggggtgcggagtaaattcgggataataatttgcgtgttgtttggaagtaggttttttagaaaggatgataaaaatttggtgatgcggaagaagtttttattgtgtttaggaaagggtagcggttttttagttgtatcggttttggtttcggtttttatttttagtacgttttgttattttaataaagagcggtttttttatttgattttaattcgtattagttagcgtcgaggaaaga

SEQ ID NO: 44 - DNA, 2475 bp, Artificial Sequence; identical to SEQ ID NO: 40
  chemically treated genomic DNA (Homo sapiens)

SEQ ID NO: 45 - DNA, 2475 bp, Artificial Sequence; identical to SEQ ID NO: 41
  chemically treated genomic DNA (Homo sapiens)

SEQ ID NO: 46 - DNA, 2345 bp, Artificial Sequence
  chemically treated genomic DNA (Homo sapiens)
gcgttcggtcgttatttttttttaattttattggtgttcgcgggttgaagggttaggacggattagaggcgagtaatttcggtggtattaggtatttttcgatttgttcgggtcgttagttgtacggattttgggtagatgcgcgtagcggttgcggtatagggcggggagcggttgttcggttttattttaaggtagtagaatgtttagagttggtttttggttttaggcgtaggtcgagtagtagttgggcgggtagcggcgtcgggtaggtttttttagtcgggttgataggtcgttttgatttagttattagatttcgtttgcgttttggtagcgcggattttagggtaatttcgttgtagtggttaagtcgggggcggaattggtttatatttttgaatcgagtaagtttaggagtaggtgcgtcggcggcgttgtgaagcggtatttatgataggtaggttgggcgtcgttatttcgaaattttcgagggaggattagttagtttaggttggcgttggagttgtagcgttatttgtaggttaagaagtttttttttgggaggttggagttgtagcgttatttgtaggttaaggagtttttttttgggaggttggagttgtagcgcgacgtgtaggttaaggagtttttttttgggaggttggagttgtagttgtagtgaagttataggtttcgtgacgttataggtgggtaggcgtattagtttgtaacggattggtttggttttattcgcgaggttttgtagtggttgtttggtttggtagtggtcgtttggtttggcgtggtagtgatcgtttggtttggtatttttggtttagcggtttttttttcgtagattggaaatcgcgggttattttgttgggaggttgtggtcgaggtagtagttcgttattgatggttttttggggtggagaaaagcggggaggggttgaggggttttcgaagtcggtagtttacgttacgaggaaaatcggtagcgttaggagttaggaggattagtggtatttgggttattcgggggattagtggttttcgggttttttttatagttggtggaaaaatagcgtcggtagcgagagtaagtacggtgagggcgttttagattagttttagtacgatgttcgtttggaagattttggcgagttttatagagttgttcggtcgggcgacgtttttggggtggagtacgttttggtttttggagatattggcgtggataagagggataggaagaagaggtaatggttaggcgaaggatgcgggcgcgtcgttttgtcggggatattggttttttggtgttcgtaggttttacggtattcgggatggggaaacgttagaggggttaggggtttaggttttttagtgagacgggattaaatataaaggattattattattgtaaaagtgttggtttattttataggagttttttttaaaaatattgtattttttaattgtgtttatttatttttttaatttatttattaaatataagggtcgggcgcggtggtttacgtttgtaatattagtattttgggaggtcgaggcgggcggattacgaggttaggagatcgagattacggtgaaatttcgtttttattaaaaatataaaaaattagtcgggcgtagtggcgggcgtttgtagttttagttattcgggaggttgaggtaggagaatggcgtgaatttagaaggcggagtttgtagtgagcggagatcgcgttatagtattttcgtttgggcgatagaacgagatttcgttttaaaaaaaaaaaaaaaaaaatataaattgaatatttattatatagtagatatattttattgtcgtttaggttttttttatttttaagaattttatgttggtcgggttcggtggtttatgtttgtaattttagtattttgggaggtcgaggagggtagattacgaggttagaagttcgagattagtttgatcgatatggtgaaatttcgtatgttatgtttttgttttagtttagatttagttaaaatttttatgataaattattttttaggttttcggggtttagtttaaataatgttgtagaaagagatgagttttttttttttattgttattagatttgtatgttgaggattttttttttagatcgtggaatgttttatattatttttttttagatttgtggtaggaagttattattagaattttgagttttaagtatgttagttggatttaatagagttaagttttatttatgatttatgaatatttatgtataaaatgagagttttggtagggtgtagtggtttatgtttgtaattttagtaatttgggaggtt

SEQ ID NO: 47 - DNA, 2345 bp, Artificial Sequence
  chemically treated genomic DNA (Homo sapiens)
agttttttaaattgttgggattataggtatgagttattgtattttgttaaagtttttattttatatatggatatttatgagttatggatgagatttagttttgttaaatttaattaatatgtttgagatttagaattttggtgatggttttttgttataaatttgggaaaggataatatgggatattttacgatttaagaaaagggtttttagtatatagatttggtagtaatgagaaaaggaaatttatttttttttgtaatattatttgaattgaatttcgagggtttaaaggataatttgttatgaaggttttagttaagtttaggttgagataaaagtataatatgcggggttttattatgtcggttaggttggtttcgaatttttgatttcgtgatttgtttttttcggttttttaaagtgttgggattataggtatgagttatcgagttcggttaatatgaagtttttaaggatggaaggaatttgagcgatagtagaatatgtttgttgtataataggtatttagtttatgtttttttttttttttttttgagacggagtttcgttttgtcgtttaggcgggagtgttgtggcgcgattttcgtttattgtaagtttcgttttttgggtttacgttatttttttgttttagtttttcgagtagttgggattataggcgttcgttattgcgttcggttaattttttgtatttttagtagagacggggttttatcgtggtttcgattttttgatttcgtgattcgttcgtttcggttttttaaagtgttggtattataggcgtgagttatcgcgttcggtttttatgtttgatgaataaattgagaaaatggataaatatagttgggaagtgtaatatttttaaagaaaatttttgtaaagtagattaatatttttgtaatagtaataattttttatatttgatttcgttttattaagaggtttgggtttttgatttttttgacgtttttttatttcgggtgtcgtggggtttgcgggtattagaaagttagtgttttcgataggacggcgcgttcgtatttttcgtttggttattattttttttttttattttttttgtttacgttagtgtttttaggaattaagacgtgttttattttagggacgtcgttcgatcgggtagttttgtggagttcgttaagattttttaggcggatatcgtgttggggttggtttaaggcgtttttatcgtgtttgttttcgttgtcgacgttgtttttttattagttgtaggagaagttcgaggattattggtttttcgggtagtttaagtattattggtttttttggtttttgacgttatcggtttttttcgtggcgtagattgtcggtttcggagattttttagttttttttcgtttttttttattttaggagattattagtagcgagttattgtttcggttataattttttagtaggatagttcgcggtttttaatttgcgaaaggaggatcgttaagttagaaatgttaagttaagcgattattgttacgttaagttaagcgattattgttaagttaagtagttattgtaaagtttcgcgggtaaggttaagttaattcgttatagattagtgcgtttgtttatttgtgacgttacggaatttgtgattttattgtaattgtagttttagttttttagaaaaagattttttggtttgtacgtcgcgttgtagttttagttttttagaaaaagattttttggtttgtaggtggcgttgtagttttagttttttagaaaaagattttttggtttgtaggtggcgttgtagttttagcgttaatttgggttggttggttttttttcggaggtttcggggtggcggcgtttagtttgtttgttatgagtgtcgttttatagcgtcgtcggcgtatttgtttttaggtttgttcggtttaggggtatgggttagtttcgttttcggtttggttattgtagcgaagttgttttagggttcgcgttgttaggacgtaagcggagtttgatggttgggttagagcggtttgttagttcggttggaagggtttgttcgacgtcgttgttcgtttagttgttattcggtttgcgtttggagttagggattagttttgggtattttgttgttttaggatggggtcgagtagtcgtttttcgttttgtgtcgtagtcgttgcgcgtatttgtttagggttcgtgtagttggcgattcgggtaggtcggggaatgtttggtgttatcgggattgttcgtttttagttcgttttgattttttagttcgcgagtattagtgagattgaagaaaagtgacggtcgggcgt

SEQ ID NO: 48 - DNA, 2291 bp, Artificial Sequence
  chemically treated genomic DNA (Homo sapiens)
gttttaattttagtatatgtttgttgttgaagtaagttttgtttgttttagattgagttttgttttgttatttaggttggagtgtagtggcgtgatttcggtttattgtaagtttcgttttttgggtttatgttatttttttgttttagttttttgagtagttgggattataggcgtttattattacgttcggttatttttttttgtattttttagtagtgacggggttttatcgtgttagttaggatgtttttaattatttgatttcgtgattcgtttattttaggtttttaaattgttgggattataggtatgagttattgtattttgttaaagtttttattttatatatggatatttatgagttatggatgagatttagttttgttaaatttaattaatatatttgagatttagaattttggtgagggttttttgttataaatttgggaaaggataatatgggatattttacgatttaagaaaagggtttttagtatatagatttggtagtaatgaaaaaaggaaattcgtttttttttgtaatattatttgaattgaatttcgagggtttaaaggataatttattatgaaggttttagttaagtttaggttgagataaaagcgtaataggcggggttttattatgttggttaggttggtttcgaatttttggtttcgtgatttgtttttttcggttttttaaagtgttgggattataggtatgagttatcgagttcggttaatatgaagtttttaaggatggaaggaatttgagcgatagtagaatatgtttgttgtataataggtatttagtttatgtttgatgaataaattgagaaaatggataaatatagttgggaagtgtaatatttttaaagaaaatttttgtaaagtagacgaatatttttgtaatagtaataattatttatatttgattttattttattaagaggtttgggtttttgatttttttgacgtttttttatttcgggtgtcgtggggtttgtgggtattagaaagttagtgtttttgataggacggcgcgttcgtattttttatttggttattattttttttttttattttttttgtttacgttagtgtttttaggagttaagacgtgttttattttagggacgtcgttcgatcgggtagttttgtggagttcgttaagattttttaggcggatatcgtgttggagttggtttaaggcgtttttatcgtgtttgttttcgttgtcgacgttgtttttttattagttgtaggagaagtttaaggattattggtttttcgggtagtttaagtattattggtttttttggtttttaatattaggggtttttttcgtggcgtagattgtcggtttcggagattttttagttttttttcgtttttttttattttaggaggttattagtagcgagttattgtttcggttataattttttagtaggatagttcgcggtttttaatttgcgaaaggaggatcgttaagttagaaatgttaagttaagcgattattgttacgttaagtagttatcgtaaagtttcgcgggtaaggttaagttacgcgggtaaggttaagttaattcgttatatattagtgcgtttgcgtatttttgacgttattgaatttgtgtttttattgtatttgtagttttagttttttagaaaaagattttttggtttgtaggtggtgttgtagttttagtgttaatttgggtcggttggttttttttcggaggtttgggggtggcggcgtttagtttgtttgttatgagtgttgttttatagcgtcgtcggtgtatttgtttttaggtttgttcggtttaggggtatgggttagtttcgttttcggtttggttattgtagcgaagttgttttagggtcggcgttgttaggacgtaagcggagtttgatggttgggttagagcggtttgttagttcggttggaagggtttgtttaacgtcgttgttcgtttagtttttatttggtttgcgttcggagttagggattagttttgggtattttgttgttttaggatggggtcgagtagtcgtttttcgttttgtgtcgtagtcgttgcgcgtatttgtttagggttcgtgtagttggcgattcgggcgggtcggggaatgtttggtgttatcgggattgttcgtttttagttcgttttgattttttagttcgcgagtattagtgagtttgaagaaaagtgacggttgggcgcggtggtttatatttgtaattttagtattttgggaggttgaggtgggtagattatttg

SEQ ID NO: 49 - DNA, 2291 bp, Artificial Sequence
  chemically treated genomic DNA (Homo sapiens)
taagtgatttgtttattttaattttttaaagtgttgggattatagatgtgagttatcgcgtttagtcgttatttttttttaaatttattggtgttcgcgggttgaagggttaggacggattagaggcgagtaatttcggtggtattaggtatttttcgattcgttcgggtcgttagttgtacggattttgggtaaatgcgcgtagcggttgcggtatagggcggggagcggttgttcggttttattttaaggtagtagaatgtttaaagttggtttttggtttcgggcgtaggttaagtaggagttgggcgggtagcggcgttgggtaggtttttttagtcgggttgataggtcgttttgatttagttattagatttcgtttgcgttttggtagcgtcgattttagggtaatttcgttgtagtggttaagtcgggggcggaattggtttatatttttgaatcgagtaagtttaggagtaggtgtatcggcggcgttgtgaagtagtatttatgataggtaggttgggcgtcgttatttttaaattttcgagggaggattagtcggtttaggttggtattggagttgtagtattatttgtagattaaggagtttttttttgggaggttggagttgtagatgtagtgaaggtataggtttagtgacgttaaaggtgcgtaggcgtattggtgtgtaacggattggtttggttttattcgcgtggtttggttttattcgcgaggttttgcggtggttgtttggcgtggtagtgatcgtttggtttggtatttttggtttagcggtttttttttcgtagattggaaatcgcgggttattttgttgggaggttgtggtcgaggtagtagttcgttattgatggttttttggggtggagaaaagcggggaggggttggggggttttcgaagtcggtagtttacgttacgaggaagatttttagtgttgggagttaggaggattagtggtatttggattattcgggggattagtggtttttgggttttttttatagttggtggaagaatagcgtcggtagcgagagtaagtacggtgagggcgttttagattagttttagtacgatgttcgtttggaagattttggcgagttttatagagttgttcggtcgggcgacgtttttggggtggagtacgttttggtttttggagatattggcgtggataagagggataggaagaagaggtaatggttaggtgaaggatgcgggcgcgtcgttttgttagggatattggttttttggtgtttataggttttacggtattcgggatggggaaacgttagaggggttaggggtttaggttttttaatgagatgggattaaatataaatgattattattattgtaaaagtgttcgtttattttataggagttttttttaaaaatattgtattttttaattgtgtttatttatttttttaatttatttattaaatataagttgaatatttattgtatagtagatatattttattgtcgtttaggttttttttatttttaagaattttatgttggtcgggttcggtggtttatgtttgtaattttagtattttgggaggtcgaggagggtagattacgaggttagaagttcgagattagtttgattaatatggtgaaatttcgtttgttacgtttttgttttagtttagatttagttaagatttttatgataaattattttttaggttttcggggtttagtttaaataatgttgtagaaagagacgagttttttttttttattgttattagatttgtatgttgaggattttttttttagatcgtggaatgttttatattatttttttttagatttgtggtaggaagtttttattagaattttgagttttaagtatgttagttggatttaatagagttaagttttatttatgatttatgaatatttatgtataaaatgagagttttggtagggtgtagtggtttatgtttgtaattttagtaatttgggagtttaaggtgggcggattacgaggttaggtgattgagagtattttggttaatacggtgaaatttcgttattattaaaaaatataaaaaaaaatagtcgggcgtggtggtgggcgtttgtagttttagttatttaggaggttaaggtaggagaatggtatgaatttaggaggcggagtttgtagtgagtcgagattacgttattgtattttagtttgggtgatagagtaagatttagtttaaaataaataaaatttgttttagtagtaaatatatattaaaattggaat

SEQ ID NO: 50 - DNA, 2170 bp, Artificial Sequence
  chemically treated genomic DNA (Homo sapiens)
gtgatttttttttttaggatttagtagtattttatcgcgttatagtagttagtatttttaaagtatatattttaatatttttcggtcgtagtatatttaattttttcgtcggggcgtgggggttttttttttttcgagtatagttttcggtttttcgattttttttgttttattttttcgttttttaagtatattgtgtttatttttttaggtagtttttttagcggtcgggtagtagtagggtttcgagttcgtttttttcggggcggttatacgtgtttattttttggggttggggatcgtttttttcgtttggttgttgattggtgtttttttttattttatttttttcgtcgttttttagtttttattttatttcgttttagtttaattagttttatcgtttttttttttcggagaaaaaagttattttagagttttttgggcgtcgttttcggttggaataaaagcgttaagaaataggtggaaagtattttatttttttaggttttatatttttagggtggatagttcgtttttgtttcggttttgttttcggtattaataataattgaatttttatacgtgtacgtttttgtttttagttcgatcgaaaggattatttcgcgggttttttaaaaggacgcgattatttaggttaagtgggggtgggagagtttttggtcgtttttttttgggaaagtgttttaattttttagttttaaagttttggagggcggagggcgtttcgtgagagttttcgggggtgcggttcgcgttttttgggttttgcggatttgggttcgggggcgcgcgtttcgtttttttttttttttggcggtgtagttgttcgggcgggggtggggcgggggtcggggttcgcgtgggattaattaggatcggggcgggagtcgatcgcggtcggcggggagggttagtttcgttttggcgggcgggcgcgtggtaggggttttcggaggtttcgagttttcgggaggcgtttcggttaatttcgggtcggtggggatcgggtttgggcgcggggttttgaaggtgtggaaggaaagtttgggatttcgttatttttttatagcgttttttttttcgtaatatttagtttttttatcgcggggttcgggagtttttggagttgatttcgttattattattttttcgggcgagcgcggaggacgggttggttattttggttaggtcggaggtgttttttagttcggggttttgtgataattgggtcgaaattcgagggttttggagcgcggcgggtggcgggagtttgcggagcgcggcgtattcggcggttaggtatcggttagtttagcggtagtttttttttttttatttttatttttatttttggaaggagttgagaattagtcgattggttggtaggttgaattgtttttttttttatggtaatatgtgtcgtgattttttattttttgtttttggataaaggtgaatggtaattgcgttggttagtttttgttttttgttttgcggatgggttcgtcgacgtagtaattaaaattagagttatttttttggaagagtaaatcgttgttgttgtttttttagttttacggattttattttgtgttattttcgggttgattttaattcgtttattttagagttttttgttttatttttatttttagatttagtcgtgtttgttgaaatattagttgttttttttgtgaatgaagtgtgggaatttgttttcgtcgtagttaatgaaattaggaaaataaaaagattaaaagggttggggatgggagaatgaagaggaatgtagatagatagtttagggttatttattggtttttggcgatttttagttttttaagttgattaaaataatgtgaggaaatgtgggtttttttattttttaggaagaggtaataacgggtattttacgtggcgttatagcgtttgtttttaaagtttgaacgtgaatgtagtaagtataattttattaatgaaaatattttttagataattgttaatattgacgaaagaagagaaatagagatacggaagttaaagagttgggaattttaaaggttaaaggatgttttttagttattttgatgttttgtgtttttttttagttggtataaaatcgtgagtagtttaattatattttgta

SEQ ID NO: 51 - DNA, 2170 bp, Artificial Sequence
  chemically treated genomic DNA (Homo sapiens)
tgtaggatataattaaattatttacgattttgtattaattgaaagaaaatataggatattagagtaattgagaaatattttttgatttttaggatttttaattttttagttttcgtgtttttgttttttttttttcgttaatattaatagttgtttaaagaatatttttattaataaaattatgtttgttatatttacgtttaaattttgaaaataaacgttgtggcgttacgtaaaatgttcgttattatttttttttaaaaagtggagaagtttatatttttttatattgttttaattagtttaaggaattaagaatcgttaaaagttagtgagtggttttagattatttgtttatatttttttttatttttttatttttaatttttttgatttttttatttttttgattttattaattgcgacgagagtaagtttttatattttatttatagaagaagtaattgatattttagtaaatacgattaaatttaaaaataaaggtgaggtaaagagttttgaaataaacgagttaaaattaattcgaaaatggtataaagtaagattcgtggggttggggaggtaataataacgatttgtttttttaaaagagtggttttaattttgattattgcgtcggcgaatttattcgtagaatagaaaataaaaattgattaacgtagttgttatttatttttgtttaaaggtaaaaggtgaaaagttacgatatatattgttatagaagagaaggtaatttaatttgttaattaatcgattaatttttagttttttttaaaaataaaaataaaaataggagaaagggggttgtcgttgggttggtcgatgtttggtcgtcgagtgcgtcgcgtttcgtaagttttcgttattcgtcgcgttttaggattttcgggtttcggtttagttattataaagtttcgggttggaaaatattttcggtttggttagaatggttagttcgtttttcgcgttcgttcggggggataatggtggcgagattaattttaagggttttcgagtttcgcgataaagaggttggatattacgggaggaaggacgttgtggaagaataacggagttttaaattttttttttatatttttagagtttcgcgtttaggttcggtttttatcggttcgaagttggtcggagcgtttttcgggagttcggggttttcgggagtttttgttacgcgttcgttcgttagagcggggttagtttttttcgtcggtcgcggtcgattttcgtttcggttttagttaattttacgcgggtttcggttttcgttttattttcgttcggatagttgtatcgttagggagggggaggggcggggcgcgcgttttcgggtttagattcgtaggatttagggggcgcgggtcgtattttcgagaatttttacgaggcgtttttcgttttttaggattttgggattggggagttgaagtatttttttaagggaggacggttaggagtttttttatttttatttggtttgagtggtcgcgtttttttaaagggttcgcggggtggttttttcggtcgggttagagatagaaacgtgtacgtgtgggagtttagttattattgatgtcgagggtagagtcggagtaggagcgggttgtttattttagaaatatgaagtttagagaagtgaagtgttttttatttgttttttaacgtttttattttagtcgagaacggcgtttaaggagttttgaagtggttttttttttcgagggaagaaggcggtggggttgattgagttggaacgaagtaggatggaggttggagagcggcgggaagggtggggtagggggaggtattaattagtagttaagcgggaagagcgatttttaattttagggaatggatacgtgtgatcgtttcggagaagacgggttcggaattttgttattgttcggtcgttgaaagagttgtttggaagagtgagtataatgtgtttggaaggcggggggatggggtagaggaaatcgggaagtcggggattgtgttcggaggggaggagatttttacgtttcggcggagggattgaatgtgttacggtcgaagggtgttggagtgtgtgttttagaaatgttaattgttgtagcgcggtggagtattgttaaattttaagaaaaaaaattat

SEQ ID NO: 52 - DNA, 2377 bp, Artificial Sequence
  chemically treated genomic DNA (Homo sapiens)
ttttggttgaagttgcggggagggggagtgaagtagtttggattgaataggatatattgaaggggaagtagtaagagtggtgagtggtattatttgatgtttaagtttagtaggatttgtttttttttttgatttgggtgaattttgattttaatgatgcgtaatggttagggagagagaaatttttgagagagggtagggatagggagaagtatttgagtttatttcgggttatttattttttttagtttatttttttatttttttttttttatatatatttttttatttagttttattcgtgtaaatgtaaatgtttgtagatgggggttagattttttaatagtcggagttatagttttagttagaagtttttttatatattggtttaggaagggttagatttgggttataatttgggaggaaagagagatggttagaggagagtttagtttttttttttaaggtaagtttttttagaattttttttacggagagtattgagggttgaggatgggtttggtaagaagaaataaatttttattttttttttatgaagattaaaaattaaattaatttttattttattgagttatttagttttttttacgtttgggaagttgatttggaggtggggaaggtagagatagtgacgtgtagtatattttcgtttttggttttttattaagatgttggtggtgtgttatagaggagagggagtgtgtgtgattttttatatttagggtgggcgaggggcgaggatgttttaaaggtttattttttatagagtttgggggttgatgtttttttaataaggggagttgataaggtagaggttacgttgttgttttgtggatagtttagggacgtggtgaaatgatagttgttgagagagagaggagcgggaggaggagaagggcgtattttttttggagggggaggtttagttaaattggagtttgagggaattttgggatttaaaaagttttggttttaggttggtcgcggtggttcgtatttgtaattttagtattttgggaggtcgaggtcggcggattacgaggttaggagttcgatattagtttgattagtatggtgaaattttgtttttattaaaaatataaaattagtcgggcgtggtggcgcgtgattgtaattttagttatttaggaggttgaggtaggagaatcgtttgaagaggtagaggttgtagtgtgttaagttcgggttattgtattttagtttggtaatagagcgagatttcgttttaaaaaagaaaaaaaaaaaagtttttttttttagtttttttaattttttttagacggggtttttagagtaggaaggtgaagagggaagtaagtttttttttgagttagggaggggttagaagatttaattaggtttggttttgtgggttttttggggtgtgtgtgtgtgtttttttttatttttttttgtgtgattttttttaagggaaaggatatttgcgttttgtattgggggtaggaagattggtttttatgatgatgaggaggagataaatatttgttgtttaggttataggttttttagagttatttggttttttttttttttttttttttagtttagggtttgggaagtttggttgtgtttgtttagtgttaattttgatttttttttgttgttattttttttttagattggtatttttgttgggaggggtcgggtaatcggtttcgtttttgtaagattagagagaaggtattcgttttagtataggagacgcggtcgtcgtagaaataagggtttttgttttaacggaataagcgtagtttatagttcggaaaagggtgtggtcggtcgaggagtgcgggggagtgtgcgtcgcgggtattgtagtagtcgtattattttttttcgtagtttttttttcgtttagtagtcgtttttgtcgcgttgtagtttggcggttggaggtttgaaggtggttgttcgagggtcgtttaggggtcggggttgggttttagcgggtattcggggataaaagcgagaaaagagagaatcgtatggttttaagtaggtaaaaagtttcgaggaggatgggaaagattagggaaatttttgagaggtaacgggattaggatttttaggagtagtaaagtcgcgagtggtattaaaagtaagagggacgtttaagatggtttggttaggagggagagtttcggttgagacggggtttttagatgttattattgttgttgtttaagtagaggaagaagttttgattttgtggaaggatttagtttgggtatgcgaaagggtgggtggggagagtgagtagtcggttttaagagtggcgcgtttagtaggtaggcggttagcggggagagagggg

SEQ ID NO: 53 - DNA, 2377 bp, Artificial Sequence
  chemically treated genomic DNA (Homo sapiens)
ttttttttttttcgttagtcgtttgtttgttggacgcgttatttttggaatcgattgtttattttttttatttattttttcgtatgtttagattggatttttttatagaattaggatttttttttttatttgggtaatagtagtaataatatttggggatttcgttttagtcgaagtttttttttttagttaagttattttgaacgttttttttgtttttggtgttattcgcggttttgttgtttttggaaattttggtttcgttattttttaaaggtttttttagttttttttatttttttcgagattttttatttatttaaagttatacggtttttttttttttcgtttttattttcgggtattcgttaggatttagtttcggtttttggacgattttcgggtagttatttttaagtttttagtcgttagattgtagcgcggtagaggcggttgttggacggagggagggttacgggaggaggtggtgcggttgttgtagtgttcgcggcgtatattttttcgtatttttcggtcggttatattttttttcggattgtgggttgcgtttgtttcgttggggtagagatttttatttttgcggcggtcgcgttttttgtgttgaggcggatgttttttttttagttttgtagaggcgaagtcggttattcggttttttttagtagaggtgttagtttagggggagaatggtagtagagaggaattaaaattgatattagatagatatagttaagttttttaggttttggattggaaaggggaggagaaagagggttaaatggttttaggggatttgtagtttaggtagtaagtgtttgttttttttttattattatggaaattaatttttttatttttaatataaagcgtaggtgtttttttttttaaaaggagttatatagagaaagatagaggaaaatatatatatatattttaaaaaatttataaagttaggtttaattaggttttttggtttttttttgatttaaggaaggatttgtttttttttttatttttttgttttagaagtttcgtttgaggggagttgagaaggttggaaaaggggattttttttttttttttttttgagacggagtttcgttttgttgttaagttggagtgtagtggttcgaatttggtatattgtaatttttgtttttttaagcgatttttttgttttagttttttgggtagttgggattatagttacgcgttattacgttcggttaattttgtatttttagtagagatagggttttattatgttggttaggttggtgtcgaatttttgatttcgtgattcgtcggtttcggttttttaaagtgttgggattatagatgcgagttatcgcggttagtttggaattaggattttttaaattttaggatttttttaaattttaatttgattggatttttttttttagaaagaatgcgtttttttttttttttcgttttttttttttttagtagttgttattttattacgtttttgagttatttatagggtaatagcgtgatttttattttgttagttttttttattagagagatattagtttttaaattttgtgaggaatgaatttttggggtattttcgtttttcgtttattttgagtgtgaggagttatatatatttttttttttttgtggtatattattagtattttagtaggaaattagaggcgagggtgtgttgtacgttattgtttttgttttttttatttttaggttagttttttagacgtggaaaaggttgaatggtttaataaggtgaggattgatttgatttttagtttttatgaggggagaatgggaatttgtttttttttgttagatttatttttaatttttagtgtttttcgtggggaggattttgaaggaatttgttttgagagggaagattggatttttttttgattatttttttttttttttagattgtggtttaggtttggttttttttgggttagtatatggagaagtttttggttgaaattgtggtttcggttgttaggggatttaatttttatttgtaaatatttatatttatacgagtggaattgggtgaaaaggtatgtgtggaggagggaaagtgaggaggtaggttagggagggtgagtggttcggagtagatttaggtatttttttttatttttgtttttttttaggaatttttttttttttagttattgcgtattattggagttaaggtttatttaggttagagaaaagagtagattttgttggatttgaatattaggtaatattatttattatttttattgttttttttttaatgtgttttgtttagtttaggttattttatttttttttttcgtaattttagttaagg

SEQ ID NO: 54 - DNA, 2356 bp, Artificial Sequence
  chemically treated genomic DNA (Homo sapiens)
taatatatattttttaaggtaattaaagggaatatttatttttgtttgaggaaaaaatattttgtaagttaaaatttttattaatatagtattttattatatgattttttttttttattttaaaataatggggtttaattttttgaagcgtagtttttttagtaataaaggcggataaatttgtttttttttgtaagtagatattttttaaaggtaagaaagggaagattttgttagtttagtttattatagttaatgttttttttattaagtgtttaattgtttcgaaagttagatgttttagaaagttagatgttttatagttgttttggtggtaattattttaagatagcggtattaaaggttttgatttttagtttttttatttaaaaaatggggatattaattattttataataaagttttgatgatataatgagattataaataaaatattttgtgatgtttgatttattatttaattaaaatttttataatggatttatatttttggtttagttattatatattttgttaagtggtttttttttaagaaaaattggggatgggggggttaggggggtgggagagtagtagggagtaggaggtagggaaggaggaaaataagtaaaattagtatatatataagtttttttatttttgattgtttgcgttttttgtgttttttttttttaagtttttttaggtttatgttttgaatttttttttttataaatgaaatataacggatacgaattatagagaattttacggaagatattggagtttaagtttgtagattagttttttgtttataagcggaggcgattggaaaattaagttaaataagcgttggataattttaaatagttaaagaagttttaatgggatagggtttaggtttattaaaggaggtaatattagtaattgacgaaattatagcgacggttgatcgattatgattcgaggtataagacgttaaatttaaggttattaattaacgtgcgtaagaagcggttttaatcgattcgggcgatgttaatcgcgtaattattggtcgtcgcgttattttaggtttaggaatagtttagttcgtaatagggagattttaattagggagaggaggagcggggtaaaggggttgggtgttttttaagtcgttgcgcgggacgtggaagggacgaaagaggtgaggaagagtagtaaattaatttaatatatttatatttttgttgtgtttttaggattacgagaagcgggtagggggcgattttcggttttttttatttcgtaaaggtttttaattgggtttttcggttaattttttagttatcgttattttgaaatttcgcgttttttcgtattttttacgttattttttatttttttgtttcgtttttttttagcgtcgtttgattttggaattatagagaatatttaagaattttaggattagagtttttttcggttttatataatatttaattggttggttgtcggttaagagttcgttttattgcgtttatttagtataataggaattagaagaagatagttgttaattgagtggttgacggttttgtttttcgagttggaggtattttgatttagttgttgggagtttggtacgttgagtcgttcgagaacggtatattttgtagataaagaagcgttttgcgttttttgttttttggaattattttagtttttgtatttttttgttttttatgatttaagtaggtgcgattttttaggggtgttttcgtgtgtaaacgaatatttagataatatttgttattgagtttaattcgttttgtaagtattaggttattttatgtgagcgtttagtacgtgtggaaatttaatagataggtagaatagaacgtttgtagattatttgaataaataaattagtattcgtattagagtcgtagattgtttatatgggcggtgatttattatttgttagtagtgttttgaagaagaaatacggggatatatatgtagtcggttttaagttatatgagtggtaaggttgatatatattggttatattttcgattggtttttttattagttaaaagttttttatgatgttattttacgtacgggattttttatttaattttagttttcgttttttttttattttttatttttttttttcgtgagttagtttttatttattttttttaaaggtaagtttaaatatttaaaaaattattttagaggatacgtttggttatttttaattttaatttgattattttatgtaggaaggttatttttattattagttataaatattttaaaatattgatggagatatatattaatttttagtagaatttttaaa

SEQ ID NO: 55 - DNA, 2356 bp, Artificial Sequence
  chemically treated genomic DNA (Homo sapiens)
tttaaagattttgttaaaaattagtatgtatttttattaatattttgaaatatttataattggtggtaagaatagtttttttatatgggatagttaggttaagattagaaataattaagcgtattttttaagatagttttttaaatgtttaaatttatttttaagggaaataagtgggggttgatttacggaaagaggggatagaaggtagggaaagggcgaaggttagagttaagtgaagaatttcgtacgtagagtgatattatagaggatttttggttggtgaaaagattagtcgggaatatagttaatatatattaattttgttatttatataatttaaaatcgattgtatatgtattttcgtattttttttttaaaatattattaataaataataaattatcgtttatataagtaatttgcgattttaatacgggtgttaatttatttgtttaggtggtttataaacgttttgttttgtttgtttattaaatttttatacgtattaggcgtttatatgggataatttgatgtttataaagcggattaaatttagtggtaaatgttatttgggtattcgtttatatacggagatatttttaaaggatcgtatttgtttgggttataagaaatagaaaaatgtaaaaattaaggtaattttaaaagatagaaaacgtagaacgtttttttatttgtagaatgtatcgttttcggacggtttaacgtattaggtttttagtaattaagttaagatgtttttaattcgagagataggatcgttagttatttagttagtagttatttttttttaatttttattgtattagatgagcgtaatgaggcgggtttttagtcgataattaattaattgagtattgtatggaatcggaagagattttggttttggaatttttgggtattttttatggttttagggttaagcggcgttaagagaaggcgggatagaggaatgggaaatgacgtgaggagtgcggaggggcgcgaggttttaagatggcggtagttgaggggttgatcgagagatttagttgaaggtttttacgaagtgaaagaggtcgggagtcgttttttattcgtttttcgtagttttgggagtatagtagaagtgtgagtgtattgaattgatttattatttttttttatttttttcgttttttttacgtttcgcgtagcggtttgggggatatttagtttttttgtttcgttttttttttttttggttgaggtttttttgttgcggattgggttatttttgggtttggggtggcgcggcgattagtggttgcgcggttggtatcgttcgggtcggttggggtcgttttttacgtacgttgattagtagttttaggtttgacgttttgtatttcgagttatggtcggttagtcgtcgttatggtttcgttagttgttggtgttgttttttttggtgaatttggattttattttattgaagtttttttggttgtttagagttatttaacgtttatttggtttgattttttagtcgttttcgtttgtagataaaaaattaatttgtagatttaagttttagtgtttttcgtaaaattttttgtaattcgtattcgttgtgttttatttgtgggggaggagatttagaatatgagtttgaggaaatttgagaaaggaaagtataaaaaacgtaggtaattaaagatgggagagtttgtatatgtattgattttgtttgtttttttttttttttattttttattttttgttgtttttttatttttttaatttttttatttttagttttttttagaaggaaattatttgatagggtgtatggtagttaggttaggaatatggatttattataaagattttagttaagtagtgagttaaatattataggatattttatttgtaattttattgtattattagagttttgttataaagtaattgatgtttttattttttagatgaggaagttaaaaattagagtttttgatatcgttgttttgaagtaattgttattagaatagttgtgaaatatttggttttttgaaatatttggttttcggggtagttggatatttggtgaaagagatattaattgtaataaattgggttgataaaatttttttttttttatttttaaaaagtgtttatttgtaaaaggaagtaaatttgttcgtttttattattggaaagattgcgttttaaaaaattaagttttattattttggaataagaggaagaagttatgtaatagggtattgtgttaataaaagttttagtttataaaatattttttttttaaataaaaataagtattttttttaattattttaagaaatatatattg

SEQ ID NO: 56 - DNA, 2403 bp, Artificial Sequence
  chemically treated genomic DNA (Homo sapiens)
cgcgggcgcgggagtagtttcgttgggcgttcgtagtcgcgggagttaagttttttttttaggtgtaggtataaaagtttatggtttttgaataatgcggggtagaggtttttttaagtaacgtttaattggtcgtttttaattaaggaaagagaggtttttagttttatggtaatttaagtagggtagttttaggttaaaggtattttagaataataagattattttaagaaatggaatgttttattggatattcgaataggttttttgttattggaattggtgtgtattgtattttaattagtatttttgtgtggagggaggcgatttagtttaggaaagttaattatagaaagaggtgattttcgaaaggattgttttagcgttattagaatatatgtgattatattaaaagtttaggcggatattcgtagttagttcggatttggataatttaatattgttggtagaattgaagggaataagttattttaattttattttttgtacgcgtagtgttgagtgagttgggggtgggaggatagcggttcgtttattgtttttttttaaaatttgagatttgaaaatatggaggttttattcgtttttttagtttttgattgttaataaaaaaataaatttcgttggttatattttttttttattttaaaatagtaattttatggtttgtattaagttttttagaagtttattttatttgttttgggttagggagggaataatgttaggaaaagttatcggtgtttttttattttcgttttttttagggtgtaggatgtgcgggtcggcgggtttgtgatttcggaacgttttttgttatttttttgcgcgaatttgaaaggattgggaggtgttgagagtagagtttagggttggtgtattttgcggtgttgagtgggcggcgcgttcgggcgtttaggtcgggggatttgtagtcgttttatcgcggaggggaaaatacgtagttggagggcgtgcgtcgtgcgggttgtgattcgttattttatcggttattttggggtttttttaagtttttaggtagggttgtgagagttttttagagttgaagtttcggaggttgatttgtgggtttggttgttatgggaattcggttggtttaaagaagtttttttttcgggtatttggaattttagtttagtgtggggtatcggggaagtggcgttggggggttgggttgggggattttagtcggtagtttcggagagggtttatttttggggtcgttgggtgaggtcggtacgatttttggttttaaaaggaaagtttttgttttttgttttggcgcgagaagttaaagatttattttgagagcggagagagaaatgttattggtaacgttttttttggaaagttcgagaggggttttttggatatattatttagtgtttttaaattagagaagtagtttttttttggtgtttgggtttagaagtcgttatttatttagtttatggttcgaaattagtatgggaagcgtcggggtaaggtttcgtcggagattagaggtttgtttgtcgggaggagtttttgggggatggggattttatttttttgtttgttttggtttttatttgggacgttttcgtaggagtttagaaagacgatttattatatggtttcgggatagagtagcgcgtttaattttgagggaattttgtgcgtttttttgaggttttagttttttaaggtatcgtcgttcgtttttttttttttagatcgaaattggggaagagtgtgggcgtttttttgtttcgatgagttcgtttttttaaacgtttatttcggttgtattagagtatttgggaaattttgaaaggtgtttaggttttatatagtagcgtttttttatttagtttttgtttttgggtttttttaagagagtttttattttatgtttcggttttttttcgatgtcgggttttcgaggtaggtacggagtttttttgaaagtagttgtttatttgtgtttttttggtgtaaagttagagtttattttgttgggggaaggggaggtagaaaagattatagttgggaaagtgcgtttttcgttttgtttttaaaatatgttttaagattgttatcgcgattgttaggagagttattaacgtttaggggttataaaggaatttttgaattttcggttttttttaaatttttaggtttttaaaattttagtgggggttttttggggttgggatttaggttggtatcgttgggaggatttcgtttagtatttttttattaatattttacgaaggtaggtttttgttttttttggagttttttttttcggaatgtttttaaattttggttaatttatttttttgtgagttattttagggttttgtggttcgggaagag

SEQ ID NO: 57 - DNA, 2403 bp, Artificial Sequence
  chemically treated genomic DNA (Homo sapiens)
tttttttcgggttatagagttttaggatggtttataggggagtgagttagttagagtttgggaatatttcgagaaaagaggttttagagaaggtaggagtttgttttcgtgaaatattaataaagggatgttaggcgaggtttttttagcggtgttagtttgaattttagttttaagagatttttattagggttttaggaatttgggggtttgggaagggtcgagggtttagaaatttttttatagtttttagacgttgatagtttttttaataatcgcgatgatagttttgaggtatgttttaggaataaggcgaaaagcgtatttttttaattgtgattttttttattttttttttttttaataaagtaaattttaattttatattaaaggggtatagataggtaattgtttttagagggatttcgtgtttatttcggggattcgatatcgaagaaagatcgaggtatgaggtagagatttttttgaaaaaatttaaagatagaggttgagtagggagacgttgttgtgtgaggtttgggtattttttagagttttttagatgttttggtgtagtcgaagtaggcgtttggggaggcgaatttatcggggtaaagaagcgtttatatttttttttagtttcggtttagggaaagaagaacggacggcggtgttttggaaagttagggttttagagaggcgtataaagtttttttaaagttgggcgcgttgttttgtttcgggattatgtagtggatcgtttttttgggtttttacggaggcgttttaggtgggaattagagtaagtaggagaatggggtttttattttttaggggtttttttcgataggtaggtttttagttttcgacgaagttttgtttcggcgttttttatgttgatttcgaattatgggttgagtgagtggcgatttttgagtttaggtattaaagaaaaattatttttttggtttgggggtattaggtagtgtgtttagaagatttttttcgaattttttaaagaaaacgttattaataatattttttttttcgtttttaaaataagtttttggtttttcgcgttagaataagaagtagaaattttttttttggagttaagaatcgtgtcggttttatttagcgattttaagggtaggtttttttcggagttgtcggttgaggttttttaatttagttttttagcgttattttttcgatgttttatattaaattggaattttaggtgttcggaagaaaggtttttttggattaatcgggtttttatagtagttagatttataggttagttttcggggttttagttttaggggatttttatagttttatttagaggtttggggagattttaggatgatcgatggggtaacggattataattcgtacggcgtacgttttttagttacgtattttttttttcgcggtagggcgattataggtttttcggtttgagcgttcgggcgcgtcgtttatttagtatcgtagagtgtattagttttgaattttgtttttaatattttttagtttttttaagttcgcgtaaggggatggtaggaagcgtttcgggattataggttcgtcggttcgtatattttgtattttggaaggggcgaggatggaagagtatcggtgattttttttagtattgttttttttttggtttagagtaaatgagataaatttttgaagggtttaatataagttatagggttgttattttggaatgaggagaaaatgtagttagcgggatttgtttttttgttggtaattaagagttgggaaaacgaatgggatttttatatttttagattttagattttaaaagggggtaataaacgaatcgttgtttttttatttttaatttatttagtattacgcgtataggggatggggttggggtaatttgttttttttagttttgttagtaatgttgaattgtttaaattcgagttggttgcgggtgttcgtttgggtttttggtgtggttatatgtattttaatagcgttaagataattttttcggaggttatttttttttgtagttgatttttttagattgggtcgtttttttttatataagagtattggttgaagtatagtatatattaattttaatgatagagaatttgttcgggtgtttagtgagatattttattttttagaatgattttattattttaaagtatttttagtttgaagttgttttgtttgggttgttatagagttggaagtttttttttttttaattagaagcggttaattagacgttgtttggaaaaatttttgtttcgtattgtttaagagttataaatttttatgtttgtatttggggagggggtttgattttcgcggttgcgagcgtttagcggggttattttcgcgttcgcg

SEQ ID NO: 58 - DNA, 2354 bp, Artificial Sequence
  chemically treated genomic DNA (Homo sapiens)
tataatttttggagtcgttattttcggtttattattatcgattgttttgggtttgatggagttagtttcgtaatatttgtttagaattttatttatatattcgttggatatttgtataggggaagtggatagaaaattatattattaataattttaagataaaaataaaattgtttaagtatgtattaaataatgataagtttacgttttgattgtttagtatttggatttttgtatttgtatgggtttataatataaaaatatatttttaatggtatgagaatttattgtagagagtttttttttttaaaattatatttgtagttttaaaaattataaatatgatgatatttttaaataatttgaattaaaaaacgaatttaaaagttttttttaaaaaaaaaattttttttaaatattgtttgaagatgtattaaaacgaagtagataaatttatttttgtgttgattttgtttaaagtggcgttatgttttaaagaataaaggtaaaaaataaattgatttttttatttttttttttttaaaaaatatttaattgagtaaatgtgagttagggaggagtaaatagtatttgttttttaaaattaatatatattatttataaatatgaagaataaataaatattttaaaagttgaggtaagtatgggttggggagagtagaatgaaattatgtcggtttatataatttagtttattacggtttataaattgtttttataatgaatgtttttattaaataaaaagagaaagatttttttaaaaaaattcgtatataatatttttttgaagtagatgagttattttatgtaattgatttaggttgaaagagatagggaaggatggtggaaggagaggggaaagtgggaaggtaggggagtgggtggggggattggggattggggtgggtgagggtgggggggtttataattagtatcgtttatagtaagaaatgaagagagggcgttgagagtggagggtcgcgggggcggcgagtggggcggcgtcgggaggattatttgtagaattcgggaaatgtcgtacggtcgggtttcgttgtgagttagttttataattttttgtcgggtggagttcggtagtggtcgttcgttgataaagatattatcgagttgatttatttcgttgtgatttgaggaaagggagaggagaggaaaggggaaaagaagagaagagagtagagtgaagaggaagaagagggagaagaaggaagaggaagatgagggagaataagaatagaaaggagaggaggaaggggaagaggaagaaggagaggaggaggagataattataatgtatttttatttttttgttaatttgtgttaatttcggcggttagttttttgttatcgattaaataaaggataataggattattagttatgttagatatcgggtagtttagtttaagtaatcgtgtttttgtttattgtattgtagtagtaatatagagttagatatatgttaaggaataagtatatatggattttattatagttataattttagtagtgtttttagtttattgtttttttttataaatattgtagttagtttttgaatttataaagcgttaagaatcggttttataaattttttaaagattttttttgagtgttatcgtaaattatgggttttatagattttatattgaatttttaaggtttttgtagtgttgggatagtgatagtaaattttatagtttttgagtgtttttttagacgttaaaatttagaaatgtttttattatcgtttaaattggttaaggtttggtataagtatcgagttgggttttgtttggttagaatagaagaaggaagaggagagaataattagagtagttagtatgtggttggtgaattttagtttaggttttcgtatttttagtgtagacgtgagagttagagttcgggttcggttttagttatagataagttcggttatcgtaagtaaggtttagagtcgggagtcggttcgtattagttattgttcgttttattttcgtcgttgaatttcgttttttttttagttaaggatagatattattaaaaagaaaaaatagaaaagaaaaatattatattatagtgttttttattttttttttatttttgtattttataattttatttttgtggtttaattttagagaatagggagagggagttagtttttttttgtagtttttttttttaaaaattatagatatataaagttaattgttaatttttatttttttaaaaatttttaatttgtagtttcgatttagatagtagtttttttaggaaaagacgtggttttttgtttagttttttttttt

SEQ ID NO: 59 - DNA, 2354 bp, Artificial Sequence
  chemically treated genomic DNA (Homo sapiens)
ggagaggagagttgaatagggagttacgtttttttttgggagggttgttatttaagtcggggttgtaggttggagatttttaaggaagtggaaattggtaattggttttgtgtgtttgtggtttttggggagggggattataaagaggggttaattttttttttttattttttaaggttggattatagggatgaggttgtgagatataaagataaaggagggatggggaatattatgatgtggtattttttttttttgttttttttttttgataatatttatttttggttaaggggagggcggagtttagcggcggaaataaagcgagtagtggttggtgcgaatcgattttcggttttaagttttatttgcggtggtcggatttgtttgtggttgaagtcgagttcgggttttgatttttacgtttgtattggaggtgcggaaatttggattggggtttattagttatatattggttgttttggttgtttttttttttttttttttttattttaattaaataaaatttaattcgatgtttgtgttaggttttggttagtttggacggtgatggaaatatttttggattttagcgtttaagggagtatttaagggttgtaaggtttgttattattgttttaatattgtagagattttgaaggtttagtgtgggatttgtagaatttatggtttgcggtgatatttagaggggatttttgggagatttatagagtcggtttttagcgttttgtgggtttagaggttggttgtagtgtttatgaagaggggtagtgggttggggatattgttggggttatggttgtagtgaggtttatgtgtatttgttttttggtatgtgtttgattttgtgttgttgttgtagtatagtgggtaggggtacggttgtttggattgggttgttcgatgtttggtatggttggtggttttgttgttttttatttgatcgatagtagggaattgatcgtcgaggttggtataggttggtagggggatgaggatgtattgtggttgttttttttttttttttttttttttttttttttttttttttttttttttgtttttgtttttttttattttttttttttttttttttttttttttttttttttattttgttttttttttttttttttttttttttttttttttttttttttttaggttatagcggagtgaattagttcggtggtgtttttgttaacgggcggttattgtcggattttattcggtagaagattgtagagttagtttatagcggggttcggtcgtgcgatatttttcgaattttgtaggtgattttttcggcgtcgttttattcgtcgttttcgcggttttttatttttaacgttttttttttattttttattgtaaacgatgttaattatggatttttttatttttatttattttagtttttagtttttttatttatttttttgtttttttatttttttttttttttttattatttttttttattttttttaatttgggttagttatataagataatttatttgttttagaaaaatattgtgtgcggatttttttaaaaaaatttttttttttttatttggtaaagatatttattgtgggaatagtttatgaatcgtaataagttgagttatataaatcggtataattttattttgttttttttagtttatgtttattttagtttttgaggtatttgtttattttttatgtttatgaataatatatattgattttaaaaggtaaatgttatttatttttttttaatttatatttatttaattgagtattttttaaagaagaagaagtaaaaaaattagtttattttttatttttgttttttaaaatataacgttattttaagtaaggttagtataaaaataaatttatttatttcgttttgatgtatttttaggtagtgtttaagaaaagttttttttttaaaaaaagtttttaaattcgttttttagtttaaattgtttgaaagtattattatatttgtagtttttagggttataaatgtaattttaagaaaaaaagttttttatagtaagtttttatattattgaaggtatatttttgtgttatagatttatgtagatgtaaaagtttaagtgttggataattaaaacgtaagtttgttattgtttaatgtatatttaaataattttatttttgttttgaaattattaataatgtggttttttgtttattttttttatgtaggtgtttaacggatgtgtgagtaaaattttgggtaggtattacgagattggttttattagatttagggtaatcggtggtagtaaatcgagagtagcgattttagaagttgta

SEQ ID NO: 60 - DNA, 4102 bp, Artificial Sequence
  chemically treated genomic DNA (Homo sapiens)
gcgttgttatttatttcgttttttttcgcgtatagttaatggagagatttagtcgaaatcgcgaagtttttttgtatcgggttttttcgtttggtgattgatgttttagagttaatagcgagcgagtagtcggagcggggaagtagaagttagagaggggaagaatacggcgttttttttttttttttttttttttttttattttagtttttttgcgtatttcgtttttaagttttcgcgtagttaggagtcgttgttgttttttagtttttgttagttgtttttcgagtcgagcgtagcgagcgtcgtcgttcgggtttttcggtggggttagggttagtatggagtatttgggttcgtattatttttattcgggttacgtagagtttattagtttcggtatcgattagatttttaatagttcggattagggtggttgtatgggattcgtttcgcgtttttaggacggagaatacggttttggttgtttggtcggaggcgtttatatttacggcggcgggggtttcgcggtcgcgacgggggttggaggagcgggggtttatggtattggaggtttcggcggtttcggaggttcggtaggcggcggcggcgtttgtagtatgggttttttgatcggtttttataacgtgaatatggttttggtaggcggtttcggttttggcggcggcggcggtagtagcggcggtgtcggggtatttagcgttgcgggggtaattcgggtgtcggtatataggtcgttcgtcggagtcgtggtttatttttagtttttggttatcggtttgtttatcgtgttttttgtgtttgttatgtcgggcgttaataattttattggttttatttttttttggatggagagtaatcgtagatatataaaggataggtttataggtgagttcggttcgcgcgtttttcgtttggtcgcggttcgggtttcgtgttatttttgtttcgtcgggtggttttttaaagtcggttttgcgttttaggtcgtttagttttttttggtgttttttttaagttgagtcgttcgttcgattttataacgtagattcgttatgtttgaagagtttttttagtttggatttttttttgtttttcgaaggatttttgttcggaggagttttttttggtttttttttcggatttattagtcgggttaggtagagagaaggaggttatagatttaggattattttttgtagttatttttggtttgggaattttagagaaaggggtgtaacgtgaatagtttttttcgttttggttgttgttttaggatttaggaagcgagttttaggattagatataagaaaagaataggtttttttatttttagttttttatatatatgtatttcgcgtttttagtttcggtgttcgtggtgttgcggggttagtgggggttttgagtttcggtaaattagtagaattagtggttttttttttttttttcggagagtaggttttatttgggaggatggtagcggggtttagtcgtttaggatagttagttttttattttcgttttttttcggttgggtgttttatttcgggtttagttttgttattttgggtacgaataatgtatcggtaggttggtgatcggtggcgggaagattattttcgggatattgggtattaagtggtggtcgttgtcgttttttttgttgttcgttttcgtttttttttgttggttttggttttttttgttttcgtttttattttgggtatttaattttttttttggcgtggattttttttttcgtttttattttttgttttttttagggttttttggattttagattacgattttttcgttcgggttgggaagtagttataaattgagtttaggttagttagtcgattttagagagaggaggtaggaggtattggttgttgttggtagagatggggttttttgggggtttttcggtttaagggtttaatagtggaaggggggtttatataattatttgggagaagttgttgagagttagatattgggttaggagattttaaagtatttttggttttttgtttttgttttaggtagtagtatagttagggaaattgtttttgtagttttttattagattttggggttacggtagaagtggtgtggaggttggtgtttagaggaagaatagttgtttgggtttaggttttaggaagggttttttttagaggggttttagtgtttttaatttaagttttttttggtttggggtagtagggtttggtgtttattttattttttatttaggttaggttagttttgaagggttttgttggaaatttagtcgggagtttattaattttgggtttttggtgaaaggtattcggtttagggtttatcgcggggttttaatattgtgttaggtatgaaggcggttttagcgagtgtatggttgtggttttgttttgttttgtgttttgtgtgtttgtttcgtgtttgtgtttgtttggttttgtttgggtgtatagatttgtgagtttgttttcgttgtacgttgtgttggtgtgtgttgttgtggatggaggtttaggtcgggttttagagttaggttcggttttttattttgagtttgaaggtttggggttgattgaggggaggggagcgtgattattagttcgttttagattgtttttggaggagaggcggtagggaggtggttgggttcgcgggagttcggggttagggaggttttcgtggtagcggcgacggcggcgtcggattggcgggtaggaggaggtcgtttttcgtcgtgggtttgtcgttgagggttaacgggaggatttcggttttgttcgtgggggtttagttgttgcgttcgttgattcgcggggtgttgggtttgggacgttttttgacgttttgttgtttgtttttgtcgtttgtttgtttttcgttttagtggtttttttattttttattgtaatacgtcgtataggttatttttattagaatcggacgttttttaagaagaagaagtcgcgtacgttttttatacgtttgtagatttgcgagttggagaagcgtttttatcgttagaagtatttggtttcggtcgagcgcgtcgttttggttaaggcgtttaaaatgatcgatgcgtaggttaaaatttggttttagaatcggcggataaagtggaggtgagtaagcggggcgggtcggtcgttcgcgagcggcgcggttttaggtagttttcggtttattggtttttcgtggggcgtatatatttttttcgttcgcggtttttgattttttcggaggagcgagttttcgttaggtttgcggggagttggaagtaatcgaggtcgatagttgggatggggttgaagagttttggttttgttttatcggaggttttagggttttttggttggtatattttttgtcggtgtagacgcggtaggtttatttcgtcgtttgggtaaataggcgggttagtgtattttacgtagtttaggttttagggatttgtgagttttggggagttttttgtttgcgtaaatttttgtttatggaattttgttttgttttggagattggatgtagaatagttcgtattttgttgtagcgttttagtcgggttttcggtagagggtttgtggttttagatcgcggttttgttgacggtttttttttttagatattcggtttttgcgtagtcggtttttattttggaaggagaaaattaattcgcgtcggttgcggcggggtttcgcgggttttattggaaggggaattaattaggagtagatgggtgtgtgtgagaaagagaatttttttttttttatagttataattttagttattacgtaatgggttttttgttttgttttgtttttttatatttacgtttacggacgtgaagcgtttttaatattttcgagtagttttttttttcgcgcgtattgacgtttttttcggttgtattttttggtacgttgtattttttggtacgttgtattttttcgtatatttggtttttgttcgtcggagttttttttttagtttaggttttatggggtagcgcgggagagtttgggcgaagtcggcggcgtcgagacgggcg

SEQ ID NO: 61 - DNA, 4102 bp, Artificial Sequence
  chemically treated genomic DNA (Homo sapiens)
cgttcgtttcggcgtcgtcgatttcgtttagattttttcgcgttattttatggggtttgagttaggggagaaatttcggcgggtaagggttagatgtgcgggagggtgtagcgtgttagagggtgtagcgtgttagagggtgtagtcggagaaagcgttagtgcgcgcggagagggaggttgttcgagagtgttggggacgttttacgttcgtgagcgtaaatgtgaaaaaataaaataaaataaaaagtttattgcgtagtaattagagttgtggttatgggagaaggaaaatttttttttttatatatatttatttgtttttaattgattttttttttagtgggattcgcgaaatttcgtcgtagtcggcgcggattgattttttttttttagggtagggatcggttgcgtaaaggtcgggtgtttgggggaggagatcgttagtagggtcgcggtttggggttatagattttttgtcgggagttcggttggagcgttgtaataaggtgcgggttgttttgtatttagtttttaggatagagtaggattttataagtaagagtttgcgtaaataaaaagttttttaggatttatagatttttggagtttggattgcgtggagtgtattaattcgtttgtttgtttaagcggcggaatagatttgtcgcgtttatatcggtagagagtgtgttaattagaaagttttgaagttttcggtaaaatagagttagggttttttagttttattttagttatcggtttcggttgtttttagtttttcgtaagtttagcgggagttcgttttttcgaaaggattagaaatcgcgagcggaaaaagtatgtgcgttttacgagaggttaatgaatcgagagttgtttgagatcgcgtcgttcgcgggcggtcggttcgtttcgtttgtttatttttattttgttcgtcggttttggaattaggttttgatttgcgtatcggttattttgagcgttttggttagggcggcgcgttcggtcgaggttaggtatttttggcggtggaagcgtttttttagttcgtagatttgtaggcgtgtgaaggacgtgcgcggttttttttttttggggggcgttcggttttgataggggtgatttatacggcgtgttatagtgaagggtgagagggttattggagcgggagatagatagacggtagaggtaagtagtagagcgttaggaagcgttttaggtttaatatttcgcgagttagcgagcgtagtagttgaatttttacgagtagggtcgagattttttcgttagtttttagcgataagtttacggcgggaaacggtttttttttgttcgttagttcgacgtcgtcgtcgtcgttattacggaggtttttttggtttcgggttttcgcgagtttaattatttttttgtcgttttttttttaggggtagtttaaggcgagttaatggttacgtttttttttttttagttagttttaggtttttaggtttagagtaagaggtcgagtttgattttggaattcgatttgagtttttatttatagtagtatatattaatataacgtataacgggggtaaatttatagatttatatatttaaataggattagataagtataggtacgggataagtatataggatatagagtaaaataaggttatagttatatattcgttgaaatcgtttttatgtttgatatagtattagggtttcgcggtaggttttaaatcgagtattttttattagaggtttaggattagtggattttcggttgggtttttagtagggttttttaagattggtttggtttgggtggggaatgggatgggtattaggttttgttgttttaggttagagaaaatttaggttgggggtattgggatttttttagggagggttttttttgaggtttagatttaagtaattgttttttttttggatattagtttttatattatttttgtcgtggttttagagtttggtaagaagttgtagaagtagtttttttggttgtgttgttgtttggaatagaagtaggaagttaggggtgttttggaattttttggtttagtatttagtttttagtagttttttttaagtagttatgtaaattttttttttattgttgggtttttgaatcgggggatttttaggaggttttatttttgttagtagtagttagtgttttttgttttttttttttaagatcggttggttaatttgggtttaatttgtggttgttttttagttcggacggaaggatcgtggtttaggatttagggaattttaaggggagtagaaagtgagaacgggggaagggatttacgttagagggagagttgagtgtttagagtggaaacgggagtagagggagttagggttagtagaggaaggcgggagcgggtagtagagaaggcggtagcggttattatttagtatttaatgtttcgggagtagttttttcgttatcgattattagtttatcggtgtattgttcgtgtttaagataatagggttgggttcggggtaggatatttagtcgggagagaacgaaaatgaaaagttagttgttttgggcggttaagtttcgttgttatttttttagatgaagtttgtttttcggaaaaaaaaaaaaaggttattggttttgttgatttatcggggtttagagtttttattggtttcgtagtattacgggtatcggagttaggggcgcgaagtgtatgtgtgtaggggattggaggtgggggaatttgttttttttttgtgtttgattttggggttcgttttttgggttttagaatagtagttaggacggaagaaattgtttacgttgtatttttttttttaagatttttaggttaagagtagttgtagaaggtggttttgaatttatggtttttttttttttgtttgattcggttagtggattcggagaggggattagggagagttttttcgagtaggggtttttcgggagatagagaggggtttaggttgagagaattttttaagtatggcgagtttgcgttatagaatcgggcgggcggtttaatttgggggaagtattaagaagagttgggcgatttggagcgtagaatcggttttggggagttattcggcggggtaggggtagtacggagttcgggtcgcggttaggcggggagcgcgcgggtcggatttatttgtgaatttgttttttgtgtatttgcggttattttttatttaggggaaggtgaggttagtgaggttgttgacgttcggtatggtaggtatagagggtacggtgggtaagtcggtggttaggggttgggggtgggttacggtttcggcgagcggtttgtgtgtcggtattcggattattttcgtagcgttgagtgtttcggtatcgtcgttgttgtcgtcgtcgtcgttaggatcggggtcgtttgttaaggttatgtttacgttgtaggagtcggttagaggatttatgttgtaggcgtcgtcgtcgtttgtcgggttttcggggtcgtcgggatttttagtattataggttttcgtttttttagttttcgtcgcggtcgcggagttttcgtcgtcgtaagtgtaggcgttttcgattaagtagttaaggtcgtatttttcgttttggaggcgcgaggcgggttttatgtagttattttggttcgggttgttgaggatttggtcgatgtcgaagttaatgggttttgcgtgattcgggtggaggtggtgcggatttaggtgttttatgttggttttggttttatcggggggttcgggcggcggcgttcgttgcgttcggttcggggggtagttagtaggggttgggaggtaatagcggtttttggttgcgcggagatttggaagcgaagtgcgtagaaaggttaaagtagaagggggaggggagggagagagggggcgtcgtattttttttttttttggtttttgttttttcgtttcggttgttcgttcgttgttgattttgggatattaattattaggcgaaaaagttcggtgtaagagagtttcgcggtttcgattgggtttttttattggttgtgcgcggagaggagcggggtgaatgatagcgt

SEQ ID NO: 62 - DNA, 2337 bp, Artificial Sequence
  chemically treated genomic DNA (Homo sapiens)
ggatgatattaaaagttttattatttggttttttgttttggggtttttaaggagtaagggaaagttgtggttttcggtttgtgtttggttggtggttttatatttttttatttgaggttgattttttatttgaggttgatttgttatttgaggtgggaaggggtatttggagtttttagttgtagggtgagagatatttagtggttttattttttagtttttagagttataggttaggagcggagggttaaggttggcgaaaaaatttggttatgtggacgggttaaagattaggggtcgttgcgaaggtgaggatagaaaagcgttgtagaggtttttagattatggtttcgttttcgttagagagttttaggggttttagtggtttttttagtgttgtgtatatacgaggaaaggttagagaatgagagggatatagtatttttttattttttaagtttgtacggggagaagcggttgtgagttttagtattagggaaacgtagcgttggggtttgggtaggattgatcgttttagtttttattttagttgtaattttttagtcgaatagggttcgtttcggcgggttagggttttcgtttttgttgaagaattttggtttaggaaagatggagaggttgggggttgaggagagaggaaaaaatggtaggggaggattggaggtgatcgagcgtcgagtttttatatttttattattgttgttgttgttgttattattattattattattattattattattattattattatcgaagtattttacgtttagagttaagataagattataaatataatatatagaaaattaataaaatagaattttgtttttttttgaggtttttttttttatttttaggtagtatgtgttttttttagtggttttggggagggggtgggagagacgataggtttgggattagggagtttttaaggttttcgttgaggggatagcgaatttattattgaatcgtgtacgggggatatggataaaatgagacgcgatagggataagagtattttgttttgtttttaggaaatattaagtgagttcgttttttagtttttattaggaagtttgattaggttgaggcgagtttttcgggaaggaagggcgcgcgggatgttgggtgggttcgagtagtgaggttttagagtattcgtcgggagttgtgcgggcgggggcgtttaggagagcgttgggtttcgtttgtttgcgtcggagagtaggttttttggtttttttattcgagagttttttttttcgggtttttttgacgttcgtggttttttataggttttttttttcgcgttttttttttttttttagtatttttattcggtttgtttttttttttttttttcggtattgagttgagacgcgttgagtagtttgtttttttttttttattttatgcgtcggttttggaattatattttgatttgttttttcgttaggtatagggcgtgcgcgatttcgatgcgtcgtcgtcgcgttaggtagcgattgtagtgaaattttttttttagttttagcgtttggtaacgtgtgtatgtttggcggtttcgtcggtcgttgggtttaaaggaggaatttgttacgtagagtggagatgttgaggtttgcggttatcgggtttaggatttttttttttagtcgattttcgaatatagattttagttagtatcgggatgttttttattttgtcggtttttttttttcgtttcgtatttttttagcgttttttttagatttttttttagttttttaggtttgtgtcgtttgtttagattttagatgggggaggggaggagtagtttgaatttttatttgagtttggggggaggggttggttaggtgtgtttttttttagttgtattttgtttttttttttttttttatttattttgtttttatttttcgttatttttttaatttaatgataaatttaggtcgttaattcgtaatgacgtagatcgatttatagtttatattaacggttttttattttcgagttcggttaatggatattagttgggatttaaggttaataaataatttaatttgagatttcgcgtttgtttttttttttttcgtttcgtttgtttttttttttttttttttttttatttttttttttttttttgattattattttttttttggtgttttattttgttttagttttttatttatagggaaatatagttttagatagatttaattttttttttttagcgttattttttatttttttgtatgacgtatttcgtttttaatggagtcgtttttggttggggaattttattagggt

SEQ ID NO: 63 - DNA, 2337 bp, Artificial Sequence
  chemically treated genomic DNA (Homo sapiens)
gttttggtagggttttttaattaaagacggttttattaaaaacggagtgcgttatgtaagggggtagggggtgacgttgaagaggaagagttgagtttgtttgggattgtgtttttttgtgggtggggagttggggtaagatgaggtattaggaaaggggtggtagttagaggagggaggaggaataaggggaaggaagagagagggagtaggcggagcgagagagggagaaataggcgcggggttttaggttggattatttgttggttttaagttttaattgatgtttattagtcggattcgaaagtgaggagtcgttaatgtggattatggatcgatttacgttattacggattaacggtttggatttattattgggttggggggatgacggggggtgggaataagatggatggaaagggagggaaagataagatgtaattaggaagagatatatttgattagtttttttttttaggtttaggtgggagtttaaattgtttttttttttttttatttagagtttagatagacggtataggtttaggagattaggagggaatttggagggggcgttggaggagtgcgaaacgggggaagggagtcggtagaatagagggtatttcggtattggttggagtttgtgttcgagggtcgattaggggagggggttttgggttcggtgatcgtaggttttagtatttttattttgcgtaataggttttttttttgggtttagcggtcggcgaggtcgttagatatatatacgttattagacgttggagttggagaaggagttttattataatcgttatttgacgcggcggcggcgtatcgagatcgcgtacgttttgtgtttgacggagaggtagattaagatatggttttagaatcgacgtatgaagtggaaaaaggagagtaaattgtttagcgcgttttagtttagtgtcgaggaggaggaagaaaaataggtcgagtgaaggtgttggaaagggagggaggacgcgaggggaaaggtttgtggggagttacgggcgttagagagattcgggaaggaaggttttcgggtgggggagttaggagatttgtttttcggcgtagataggcggggtttagcgtttttttggacgttttcgttcgtatagttttcggcgggtgttttgaggttttattattcgagtttatttagtatttcgcgcgtttttttttttcgaggaattcgttttagtttgattaggttttttggtgagaattgaggagcggatttatttgatgttttttggaagtagagtaaaatgtttttgtttttgtcgcgttttattttgtttatgtttttcgtgtacggtttaatggtagattcgttgtttttttagcgggggttttgaagattttttgattttagatttgtcgttttttttattttttttttaaagttattggaaggagtatatattatttagaagtaagaagaggagttttagaagaaaataaagttttattttattaattttttatgtgttgtgtttgtagttttgttttagttttggacgtgaaatatttcgatgatgatgatgatgatgatgatgataataataataataataataataataataataataataaagatgtgaaaattcgacgttcggttatttttaatttttttttgttatttttttttttttttttaatttttagtttttttattttttttgagttagaattttttagtaaaggcgagagttttggttcgtcgaagcgagttttgttcgattgggaagttatagttgagataaaggttggagcgattagttttgtttaggttttagcgttgcgtttttttggtgttgaggtttatagtcgttttttttcgtgtagatttgggggatggagaggtgttgtgttttttttattttttagttttttttcgtgtatatatagtattaagggagttattgaggtttttaaagttttttggcggagacggagttatagtttgggggtttttgtagcgtttttttgtttttattttcgtagcgatttttggtttttggttcgtttatatggttaggttttttcgttagttttggtttttcgtttttggtttgtggttttggagattgaaaaatggggttattgggtattttttattttgtagttgaaggttttaggtgtttttttttattttaagtagtagattagttttaagtaggagattagttttaagtaggggaatgtaaagttattagttaggtataggtcgaaggttataatttttttttgttttttggagattttagggtaggaggttaggtgatggggtttttagtgttattt

SEQ ID NO: 64 - DNA, 2351 bp, Artificial Sequence
  chemically treated genomic DNA (Homo sapiens)
tagttgggatgtattgttgtttttttcgttattttagtagttgtttagagatgagatttagttttattgtgtttttttgggatttataagaatttttttttgggttgagggggcgttgttgtgggtgtattttatggagagttttaaggagttagggaggagttttttggtggtttgggttttggattggtgggtgttgggtgggtttttatggttgtttttggggttgttaggtttgtaaggtagataggtttttggatttgagtgtggttgtggacgagggtagcgtcgttattagaggcgatgtttagggttattttttttgatttgtttttttttttttttgatttgttttttttttttgacgggtttgtttttgagtttgatatttgtttgggggttttcggcgaaggtcgttggtttttagaatgtattatttttttttggtatgacgggaattatttgtgatattgttattatttcgttgtaatttgggtagtagttgttatgattttattatgtgtttttcgtgaggtttttatttgttattgagtggtagggacgtgtttttatatttttatgcgttattttgtaggtgttttttgttgatttttgtgtgttttggggtttgtttttttggtaggggttgattttgtttgtgatttagatagtttggagggttaggattgaggggagggggcggtggagtgaaggggagggtgggcgttgttggtaagaattataggtaaagagggtgtcgggggtagggaaggtttggaggtttgaggagtagaaagtagatttttgattttttttgggttggtgagtcggggtttagtttagagtgatagggattaaatttgggtttatgtgtcgtgtttagtttggggtttaggtttttttttcgtgagttgagtagatagggagggttttgggggaaggttgtgggtttttgggtggaagagttttgggtgaggtttttgaattggtaagcggggtagcggcggtagggggtttagggaagtggggttagtcgggggtttttaggggttttttagggatatatttgttgttagggtgtggggagtgggaagtgggggacggggtggattttaggatttcgggttgtgtttggttagagtggggaattggacgtttcgtttttggtttagtttttttcggttgtgattttgggggattattgattttattgtgtgtttggagagtttaatttttatttgttagtgggtgatatagaaggtaggaatgtagaaggttttttagaagtttttattggtttgtaaggtagaggttgttttttgttgaggatatatttgttttttttattttttagatcggcggttgtttaaggagtttggtatagttgtacggaggcgtagtatttataggataagtggtggaatgttttggttgtttttggtgtaggtggcgggcggggttggggggttttgtagtttttttggtttcggttttttggataggttttattttttttttatcgtggtttttttggtaggttgtttgttattttaaagttacgttgttttgggtattttgtttttttcggggattggggttggggttggggtagttgtgtttatgggtgtattttttgtgttgggtattgcgttgagtttaatatataggggttcggggaggtttgtgggtgtttaggtcgagatgtgaattttgagtttgtgtaattcgagttttagagtggcggtttttgttttttataagatattgttttgcgagggggttagttttgaagtcggatggttcggttttcgttattacgtggaggttttttgtaggtgtttgtgtagatgttttcgtgcggggatttgtttggttgatggattagggggaaggttttttttacggtgtgaggtagtatcgagggtttcgtgtttagtaggtttattgtcggtagttgggtttggtttgataatcgtggatcggggtgataggttttgattttgtagagtaggattgtggaaaatggatattgatgttgttcggtggatttaggtagggtcgggatgtttgtaggatttacgggataattagaacgattgggtttgattggtatagggatgtggattacggtgtttgttattagtagatataagttgtacgtagtgggtcgtaggcgttttttgggtcggaatatatggacgtttaggtgtggaatggttcggatagtagataataagttttcgtcgtggttatttttgggtgtgggttgtgggttttaatttttttatttttgtttatttgaattttttaattaaaaatatattgttttttaaaaataataaaagattatt

SEQ ID NO: 65 - DNA, 2351 bp, Artificial Sequence
  chemically treated genomic DNA (Homo sapiens)
aatgattttttattatttttaaaaagtaatatatttttaattagaaaatttagatgagtaaaaatgaaaagattaaaatttatagtttatatttaggggtgattacgacgaaggtttgttatttgttgttcgggttattttatatttggacgtttatgtgtttcggtttagggagcgtttgcggtttattgcgtatagtttgtatttgttgatggtaagtatcgtagtttatatttttgtgttagttaggtttagtcgttttaattgtttcgtgggttttgtaaatatttcggttttgtttggatttatcgggtagtattagtgtttattttttatagttttgttttgtagagttagggtttgttatttcggtttacggttattaaattagatttaattgtcgatagtgagtttgttgggtacggagttttcggtgttgttttatatcgtggggagaattttttttttgatttattagttaaataagttttcgtacgggggtatttatataagtatttatagggagtttttacgtggtagcgggggtcgggttattcggttttagggttgattttttcgtagggtaatgttttgtgaggagtagaggtcgttattttgaaattcgagttgtataaatttagggtttatatttcggtttgggtatttatagattttttcgagtttttgtgtgttgagtttagcgtagtgtttagtatagggagtatatttataaatatagttgttttagttttagttttagttttcggaagaggtagggtgtttagggtagcgtgattttgaggtggtaggtagtttgttaaaggggttacgataagagggaggtggagtttgtttaggggatcgaagttaggaaggttatagagttttttagtttcgttcgttatttgtattaaggataattagaatattttattatttgttttgtgggtgttgcgttttcgtgtagttgtattaggttttttgagtagtcgtcgatttgggggatagagggggtaaatgtatttttagtagaaaatagtttttattttgtaggttagtgagaatttttgaaaggttttttgtatttttgttttttgtgttatttattggtaggtagggattaggttttttaggtatatagtaaagttaatggttttttaaggttatagtcgggagaggttgagttagggacggagcgtttagttttttattttgattaagtataattcggaattttggaatttatttcgttttttattttttattttttatattttgatagtaggtatatttttgaaggatttttgaggattttcgattggttttatttttttgggttttttgtcgtcgttgtttcgtttattagtttaggggttttatttaagatttttttatttaagggtttatagtttttttttaagattttttttgtttgtttagtttacggggaagaaatttgaattttaggttgggtacggtatatggatttaggtttggtttttgttattttgggttgggtttcgatttattagtttagggagggttaagggtttattttttgttttttaaatttttaggttttttttgttttcggtattttttttgtttgtggtttttgttagtagcgtttatttttttttttattttatcgttttttttttttagttttggttttttaagttgtttaagttataggtagggttaatttttattaagagagtaggttttagggtatatagaagttagtagaaagtatttgtaggatggcgtatgggggtgtgggagtacgtttttgttatttagtaataggtgggggttttacggggggtatatggtgggattatgatagttgttgtttagattatagcgaggtggtggtaatgttataggtggttttcgttatgttaggaagagatggtgtattttagaaattagcggttttcgtcgggagtttttaggtaggtgttaagtttaggagtaggttcgttagagagaggaggtaagttagaaggaggaggaggtaagttagagggggtggttttagatatcgtttttgatggcgacgttgttttcgtttatagttatatttaagtttagaggtttgtttattttgtaggtttggtagttttaagaatagttatgaagatttatttagtatttattaatttagaatttaaattattagaaggtttttttttggttttttggggttttttatgagatatatttatagtaacgtttttttagtttagggaaggatttttgtgaattttagaaagatatagtggggttgggttttatttttggatagttgttgggatggcggaaggagtagtaatgtattttagttg

SEQ ID NO: 66 - DNA, 2473 bp, Artificial Sequence
  chemically treated genomic DNA (Homo sapiens)
ggatatttttgcgcgtgtacgaacgtatttgtacgcgcgttagttttttagtgcgggtgtattttttttatttttttaggtatgcgttgcgggggaagggtcggtttaaaggtatgagttagaggaaggattgtatgtcgtgaaggttttttttattttacgttgggtttttgtatttgtgttttagtttttttgtcgaatttattaatgagatgttttttttgtagggatcggtttcgttattgagattttaggtttttgttagttattttttttttttatatttttagttattttcggtaggttttagtttcggttttatttgtgttttcgttttagtcgtagttatgttgtatatcgagggttacgttttttttcgggcggtgggttagggtaagttacgtttggttcgtttgtttttggagggaggcgtttacgtgaatgagggtgatgcgtagggggagattgcgttaatggtagtttgtcgggttcgttacgacgatttttagaataaggtacgtatggtacgttattttttggagtaaggcgcggattttaatatcgtagatcgattagggcgtacggcgtttatgtacgtttgcgtcgggggtgggggcgtcgcggtggtttcgttgttttttgtttacggcgtagattttttagttcgagattacgcgggcgtttcggtttttgtttacgttttggatcgcggggatcgcgagatttttgttatattgttggacgtttgtaaggttaagggtacggaggttattattattattatcgatatttcgtttttaggtattaagaagattcggtagtattttaattttttattatttttaggggtggaggattttgttttcgttttttttagttcggggttttgtacgtcgttttcggaaatttaattgtagatcgttggaggaggagggcgtgggatgttattttttcgcgtttaggaagaagaggagaagcgggacgtatttgaattttttttttttaagtttttcgatgatttattttttttcgagtcgttttttaaattattacgttattttttaaaattatttaaaaggtttaatttcgagttttggggtttagtggtttttttttaattagttttatttattgaagggagatcggggatcgagcgtttgattgtcgaatttaatggtttgattttgatcggtcgatttcgtttttttcgacgttatagtatcgaaggttttgaggattcgtttttatgggcggagaaagtgattagcgggggttttttttttcgtcgaaatatagtattagaagtttaggagtttggtttttttttagggttgaggtagaaattgagtcgtatggagttagtggagttggatatttttggatatttttgttttgattcgtttgagtttagtcgtttgtttttggagcgtcgtcgatatagcgttttttcgttgattttttttttagtcggttcggtttttttttcgcgttagttttaggagagtttgttaggggtagtattttcgttaagcggaaggaggcggagttcggggttgttggagcggaggggttcggggacgttgtttttggattatatttcgtaaacgcggtcgggttttttatttttttttaacgttagtttttatttttttatttttgatattcgtttataattcggaggtcgggcgttttcgttgtttgtttttttttatgtcggggcgttaggtttttttaggattaagcgtaaattggtgagacgttattttatgtagattgagtagattcgtttgttggggggtttttagagtttaggtgggtttggggagttagggcgttgagaggagtgagaggagttaaggagggtggggattaggattttaatgggataggtgggagaattagtttatatatatattacgaataaagggattttttgtatgtgtttatgggtgtatagtgtatttatatatggttaaatatgtgtttataagtatagtatttttattagtaagaaagaataagtattttatttattgggtatatatatatatgtatttatgttttggttattttatatgtatatgggattatttgtgtatttataggtatagtatattaataaatatatagggttagggttttaaatttttttgtatttgtttagaagtagtagggaatttttatttatgggtagttttcgatgtttttgtttttttgtagaagtaattttttgttttttatgtatgttttgaaatatagtttattatgattttgtatatttttttcgtggatattttagtttattttgtaggttttgtttttttttttaggtttggttttttatttatattttgtttttaattttaattattttttaggatattttttttattttttttgggggtttttgtagtaatttttagttttagttttgttgttgtttttattgtttttaattttattttttaatttt

SEQ ID NO: 67 - DNA, 2473 bp, Artificial Sequence
  chemically treated genomic DNA (Homo sapiens)
gaagttgagaagtgaagttgagagtagtaaagatagtagtagaattgaggttgggggttgttgtaggaatttttaagaagagtgaaaaagatattttgaaaagtggttggggttagaagtagggtgtgaataaggagttaggtttggagaaagaagtaagatttgtagaatgggttgggatgtttacggagagagtgtgtaaaattatgataggttgtgttttagggtatatatggaaagtaagggattgtttttgtaggagggtaaagatatcggagattgtttataagtaagggttttttattgtttttgaataaatgtaagagagtttgggattttagttttgtgtgtttattgatatgttgtgtttgtaggtatataagtaattttatatgtatgtgaaatgattagggtatgaatatatgtgtgtatatatttagtaaatagagtatttatttttttttgttaataagagtattgtgtttatggatatatgtttaattatgtgtgggtgtattgtgtatttatgagtatatgtaagagatttttttgttcgtggtgtgtgtgtgagttggtttttttatttattttattaaggttttaatttttattttttttggttttttttattttttttagcgttttggttttttaggtttatttagattttggaagttttttagtaggcggatttgtttagtttgtatggagtggcgttttattaatttgcgtttggttttgggagagtttggcgtttcggtataaggaggggtaggtaacgaaggcgttcgattttcgggttgtgggcgaatgttagggatgggagggtggggattgacgttgagagggggtaggaaattcggtcgcgtttgcgagatgtggtttaggagtaacgttttcgagttttttcgttttagtagtttcggatttcgttttttttcgtttagcggagatattgtttttggtagatttttttgggattggcgcggagagggagtcgagtcggttggagggagggttaacggggaggcgttgtatcggcggcgttttagggataggcggttggatttaggcgagttagggtaaaggtgtttaggggtgtttagttttattggttttatgcggtttagtttttgttttagttttgaagggggattagatttttgagtttttggtgttgtgtttcggcgagagagaggattttcgttagttatttttttcgtttatgggggcgggtttttagggttttcggtgttgtgacgtcgggaaagacggggtcgatcggttagggttaggttattgaattcggtagttaagcgttcgattttcggtttttttttagtgggtgggattggttgaggaggggttattaggttttagggttcggagttgagttttttgagtggttttgggggatggcgtggtggtttggggagcggttcggaaggggatgggttatcggggggtttaggaagagggaatttaaatacgtttcgtttttttttttttttttgggcgcgaggggataatattttacgttttttttttttagcggtttgtagttggattttcgaaggcgacgtgtagaatttcgggttaggagaggcgggagtagggttttttatttttggggatggtggagaattgagatattgtcgggtttttttggtgtttgagggcgaggtatcggtggtgatgatgatgattttcgtatttttggttttgtaggcgtttagtagtgtggtaagggtttcgcggttttcgcggtttagggcgtggataagagtcgaggcgttcgcgtgatttcggattgaggggtttgcgtcgtgggtaaggagtagcgaggttatcgcggcgtttttattttcggcgtaagcgtgtatgagcgtcgtgcgttttaatcggtttgcgatattggggttcgcgttttgttttaggaggtagcgtattatgcgtgttttgttttgggggtcgtcgtagcgggttcgataggttgttattagcgtagtttttttttgcgtattatttttatttacgtaggcgtttttttttagaagtaaacgggttaagcgtagtttattttgatttatcgttcgaagaagagcgtggttttcggtgtgtaatatagttgcggttggggcgagggtatagatggagtcgggattgagatttgtcgaggatgattaggggtatggggagggggagtggttggtagaggtttgaggttttagtgacgaagtcgatttttgtaagagagatattttattgatagattcggtaggaaaattgaggtatagatgtagggatttagcgtggggtggaggagatttttacggtatatagttttttttttaatttatgtttttgagtcggtttttttttcgtagcgtatgtttgaggaggtgggaagggtgtattcgtattgaaggattagcgcgcgtgtaaatgcgttcgtgtacgcgtagggatgttt

SEQ ID NO: 68 - DNA, 2425 bp, Artificial Sequence
  chemically treated genomic DNA (Homo sapiens)
gtttagttggaattagttaatttgtaaatatagtttttattttaaaaattgtgaaatgatgtttttttaaatggaaaaagtattaaggagaagaaaattgatttagttatagggtttttgggggaaaatttttagtattatttttttttttaattatagtaaaatatggtgggatataagaattaaatatttattgagtattttttttgcgtttattataattttattttaatttttgtaaatgtgattgtgatttcgtgagttagattatagaatttttgttgatagttataattggtaggtatagaaagcgtaaagatggagtttggaatggaatttggtttgtttgattttaagttttggatttattgtaatatattataattgttagttttgtaaaatgttttttttttttttttatttatttttatatttaaattaaaatttagtaaattaaattttgagtagtagaaaaaattttagtaaaggtttttttatttttgaagaattttttatataaggatatttttttttgtttttttttttacgtagaattttattaaaggttagtaagaatgggttgttgtgtttttttttaaattttatatagaagtttttaatttcgaggtaaatatttgaatggaataaatgagtatgatttgggggttaaggtaatttttaagtgtgtgtatgtgtgtgtttgttttaaggtataataaagtttagagattaaggtcgagttaaaaaataaatgaggataaattaatgaggataaattagttcgttgaggtgcggttagagtagtagtaattgtggttgtttttttgataaaggttgtgaagacggtacgttttatttttattcgtgtattttttttgatattttatttttttatgaagttttagaggtgttttaaaattgtgttaggaaatatatagagataagaaaaggtaaatggttttgatttagtgttttagggaagaggttggaaaggaaacgcggcgcgagtggggtgggagagggggtttgtggttttgtttttgttcgggttgaagattgagtaaggtagggtttttttttttgcggatgggttttttttttattttattttttatttattttcggtttcgcgtgtacgcgcgagatagtttagtgggtttatagataacgattattagagattaaagaaggaaagttagcgagtttgaatataggcgtttcgtgtggaaatgtttaaggagatcgttagaagtgcgtaagtcggagtcggttagagttttttttttatcgagagggggagttcggcgttttcggtcgggagcgattcggagtttttagtttcgcgttttagttgtcgttagcgttagttttggattcggcggattaggaagaggagggaggggggagagagcgcgaagagggaggggatcgaagttggagggtttcgagtttagcgtcgtgttggcgtagagaaattttttttttcggtttcggagacggcgtttcggtcgtgtcggagtggagatcgttaggttcggaggaatcggtagttttttacgtttttgttcgaagtttgattcgattgttttttttagtgaggtacggagatttatttaggtttttttttggttgcgaatttaggttttttttaggtagcgtggaatcgtttagaagttgatatttcgaggggcggtgggggtggatagtttcggttattagtgttcgggaaggagggcgcggggttgcgcgtagtcgttggttagtaggttgtaaaaaattaggatagttaaatgtttagggagtcgtttagtattaaaggaggttaagatttgttgacgtttgttatggtagcgtttgagaaatgattgggggagtttagcgaggtcggggacgtagcggttttcgggttttagaaatttttttagttttttgtggtaattttggttcggcggcggggggtcggtgagtaggaattggagggaggcggtggggaaatcgtggattcgttcggttgagggtgcgtggattagattgggttgagtaggtaagttatcgtcgggttatagcgaggcgatttaggagcgaatttttagggtagttttttttttgttggcgttgggagagaatgtgggtatgggggtggggaggcgcgaagtttcgaggtcgggtcgcggatattttaaagtttagagttgggagggtttaaaggaaggggcggcgtttatatggttatttttttgttgcgcgggttaagtagttttttttggagggcgtaaggcgcggcgggggtgatgagtttttgggttttcgtttcgattgttaaattcgtttggtcgggtttattttttcgtggttttattcgttatacggattagaattcggagtaggtagttttttttattttgaggtttttgcggttgtcgcg

SEQ ID NO: 69 - DNA, 2425 bp, Artificial Sequence
  chemically treated genomic DNA (Homo sapiens)
cgcggtagtcgtaggagttttagaatagagagaattgtttgtttcggattttgattcgtgtggcgagtgaggttacgagaaggtggattcggttaagcgaatttagtagtcggagcgagaatttaagggtttattattttcgtcgcgttttgcgttttttagaagaagttatttgattcgcgtagtagaagggtaattatgtggacgtcgtttttttttttgggtttttttagttttgagttttaaagtattcgcggttcggtttcggagtttcgcgtttttttatttttatgtttatatttttttttagcgttaataaaagggaggttgttttggaagttcgtttttgggtcgtttcgttgtgattcgacgatgatttgtttgtttagtttagtttgatttacgtatttttagtcggacggatttacggtttttttatcgtttttttttagtttttgtttatcggtttttcgtcgtcggattaaagttattataaaaggttaaggaggtttttggagttcggagatcgttgcgttttcgatttcgttggatttttttagttattttttaagcgttgttatagtaggcgttaataggttttagttttttttagtgttggacgattttttgagtatttagttgttttaattttttataatttgttggttagcggttacgcgtagtttcgcgttttttttttcgggtattggtggtcggagttgtttatttttatcgtttttcgggatattagtttttaagcgattttacgttatttggagggagtttgggttcgtagttagggaagagtttagataaattttcgtattttattgagagaggtagtcgggttaggtttcgggtaggggcgtggagagttgtcggttttttcgagtttggcgatttttatttcggtacggtcggggcgtcgttttcgaggtcgagagggaaagtttttttacgttaatacggcgttggattcgggattttttagtttcggtttttttttttttcgcgttttttttttttttttttttttttttaattcgtcgaatttaaaattggcgttggcggtagttgggacgcggggttggggatttcgggtcgttttcggtcgggaacgtcgggttttttttttcggtgagaaggaaattttagtcgatttcggtttgcgtatttttggcggtttttttggatatttttatacgggacgtttgtgtttaagttcgttgattttttttttttaatttttgatggtcgttatttgtgggtttattggattatttcgcgcgtgtacgcggaatcggaggtgggtggagggtggaatgagagagaaatttattcgtagaaggaggggttttattttatttagtttttagttcggatagaagtaaaattataggtttttttttttattttattcgcgtcgcgttttttttttagttttttttttgagatattagattaggattatttgtttttttttatttttgtgtgttttttaatataattttaaaatatttttgaggttttatagaggggtaaagtgttaaaagaaatatacgaataagagtaaaacgtgtcgtttttatagtttttattaagaaagtagttatagttgttgttgttttggtcgtattttagcggattggtttgtttttattggtttgtttttatttgttttttaattcggttttaatttttggattttgttatgttttaaaatagatatatatatatatatatttgaaaattgttttaatttttagattatatttatttgttttatttagatgtttatttcggaattaaggatttttgtataggatttgagagaaaatataatagtttatttttattgatttttggtaaagttttgcgtgggaaagggagtaagaaggagtatttttatataagaagttttttaaggatgagaggatttttattaaaattttttttgttgtttagaatttagtttattaaattttagtttgagtgtgaaaatagatgagaaaaggaaaaaggtattttgtaaagttagtagttataatgtattatagtggatttagggtttagagttagataggttagattttattttaaattttatttttacgttttttgtgtttattaattataattgttaataggaattttataatttagtttacggagttatagttatatttataggagttaaaatagagttgtgataggcgtagagaaaatatttaataaatatttggtttttatattttattatgttttattgtaattaggagagagggtggtgttagaaatttttttttaaagattttgtaattgaattagtttttttttttttaatgttttttttatttaaaaaggtattattttataatttttgaaatggaaattatgtttatagattaattagttttagttgaat

SEQ ID NO: 70 - DNA, 2821 bp, Artificial Sequence
  chemically treated genomic DNA (Homo sapiens)
tttaggggataatatttaggtatgttaacggagtttaaaatgttaaggaaattatattataattttgtttagtatattataggttgttaaatcgaaatgttatgttagttaggagtgtagtaatttttattttttggttttatttaattaggaagttttagtagagcgaagtttgttaagcgttcgtcgttagaatttgaaggaattcgagcgagtaagaagagtgtttgatttattttatagaagtttgtttagaaatggaggagttagcgtttattgaagtcggtttcgttttcggttcgtttatatggagtttgattagttttagttatgtttatttcggtttgggagattcgtaaagtgtttttttttttaatttttttgtattattttgaagtttagggaagtaaagagaggggtatatttggattgtaaaattaatgttttttgtcgtttaggagagaagggaatgagagagagagagagatagatagatagagagagagagagagagagagagagagagagagagagagagagagaaattttattgaaatttagtttttttagaatttgtgtgatttggtttttaacgggagattagtgcgattttatggtatttttgttaggaattagcgatttttttgtagttattatttgatttattgttttttcgtttatttttttttataaagttattttttttttattttagtaagatttttttttttaatgatgataaagtttttgttttagtgttttttttaggattggtgtttttttaaaatagtgaatttagaaaattatttcgtttaatattttttaaaattttcgtagttttaatgtaagcgtaagtatgtaaaggttttttgttatatttgtattttttgtttattttagaattattttttattttcgggtttgtaatagttttttttgtttttttggatagaggtgggtggtattaggggtttagggtagtaggaggtgaggggttgaggaggcgcgttagggtaggttggtttgtgttggatacgcgtgtttttttgcggagttaaagggtcggggacgggggttttggatttattagagtaattttagtcggtgggcgtttggtagttatttaaggaggtagggaaagtagcgagttttatcgggcgggttacgatgagtagtatgacgggtagtagtagtagttagtaaaagttttcgtaaagtgtttagttgttgtattgtcgcggggatttttatagtattatgattagttcgtgtaattttgtagtagtaaacggttttcgaggaatataggatcgcgggggtcgggtagcgggttattgagtatttcgcggacggcggtagtagaggcggcggcggtggtagtggtattcggcggggaagtagtagttaaattcgcgtatgatttcgagagttttagtaatatttagggattgggtttagtttcggagcgagagggtcgttcgttgagaagttgcgtcggagacgcgggaagttgttgttataaggagggagttttgggaagtcggaggataggaggagacgggagtttaggggtagacgagtggagttcgaggaggtagggtggagggagagttaaggcgtttcgtagttcggtagtcgtttttcgagttttgtcgttcgtatttttttggcgtttgggaagtagtaggtttttagttcgttcggggttacgtgggaagaggtagtcgggttttgattggtggagtaggatgtaggtttcgggagggaggggtcgacgaggaggtgtaaggatgtaaggaggaggcggtcgcggaagttatagatgggttcgttcgttaggcgttggttcgagtggggttaggcggggatggtttaaatgagaagttcgggttttagggtgggttattcgtatatttatatattattcgttttatttttcgttttaggacgttttttatcgaaggcggggttcggattagcgtttttttttcgcgcgtgatttcgggtcgcgagtgcgggtcgcggttgggtggcgttttttcgagttggagatggtgggggcggaggtgttagaggagtagtagtagtagggtagagaggggcgagtcggcgcgggagagggcgttttgttggcgatcggcgttttagcgtgcgggagcgcgtcgtttaggttgtagggggatgtaggttgggaatgtcgcggcggagaggttagggacgtttttttagggatttataggaaagagggtgagaggcgatggtgttagaatcgtttttgtcgatttggaagtaatagtagtattttttataagagcgtgtaattttaaggttgttcgtcgaggtagtttagttatttcggtaggcgttttttttttttttttttttttttttttttttttttaggtttttcgtagtttcgatttagtttaagcgttcgtaggtttgaatttttttttttattattcgtttttttttagttcgtagtttattagtgtgtttatttgggaggtgcggttagatgtgtttggaaggttagattggtcgggataagtggtttgagagaaagagaaaggtttttttgtatacgtcgcgggtgggttgtcgggagtatcggtcgggtagcggcgttcgggaaggggagagcgggttttatttgttggtttaggtagtgattttgcgttttttattcgggtttttgtcggatggtcggtgatttggggcgacgagagaaggtttaattcggtaggagtttttggttttgcgcgttttttttattttttttagcgggaagggtaaacggtatagcgggattcgtttttcg

SEQ ID NO: 71 - DNA, 2821 bp, Artificial Sequence
  chemically treated genomic DNA (Homo sapiens)
cggaaggcgggtttcgttatgtcgtttgtttttttcgttggagagaatgaaagaaacgcgtagagttagagatttttgtcgagttagattttttttcgtcgttttaggttatcggttattcggtaaagattcgagtaaggaacgtagggttattgtttgggttaataaatggagttcgttttttttttttcggacgtcgttgttcggtcgatgttttcggtaatttattcgcggcgtatgtagaggagttttttttttttttttagattatttgtttcgattaatttgattttttaaatatatttgatcgtattttttaggtggatatattaataggttacgggttggagaggagcgggtgatgaggagagggatttaaatttgcgaacgtttgggttgggtcggagttgcggggggtttgggaggagagaggggagaagagagaaggaaggagagcgtttgtcgggatggttgagttgtttcggcgagtagttttggggttgtacgtttttgtgggagatgttgttgttgtttttaggtcggtaagagcggttttaatattatcgttttttatttttttttttgtaaatttttagagaaacgtttttggttttttcgtcgcgatatttttagtttgtatttttttatagtttaggcggcgcgttttcgtacgttggagcgtcggtcgttagtaggacgttttttttcgcgtcgattcgtttttttttgttttgttgttgttgtttttttgatattttcgtttttattatttttagttcggagagacgttatttagtcgcggttcgtattcgcggttcggggttacgcgcggaagaggggcgttagttcggatttcgttttcggtagggggcgttttggagcggagagtgaggcgaatggtatatgagtgtgcgggtagtttattttgaagttcgagttttttatttgagttattttcgtttagttttattcgggttagcgtttggcgagcgagtttatttgtggttttcgcggtcgttttttttttgtatttttgtattttttcgtcgatttttttttttcgggatttgtattttgttttattaattagagttcgattgtttttttttacgtgatttcgggcgggttgaggatttgttgttttttaaacgttagagggatgcgggcggtagagttcgagaggcggttgtcgggttgcggggcgttttgattttttttttattttgttttttcgggttttattcgtttgtttttggattttcgtttttttttgtttttcggttttttagagttttttttttatggtagtagtttttcgcgttttcggcgtagttttttagcggacgattttttcgtttcggggttgagtttagtttttggatgttgttgaaattttcgagattatgcgcgggtttggttgttgttttttcgtcgggtgttattgttatcgtcgtcgtttttgttgtcgtcgttcgcgggatgtttagtagttcgttgttcggttttcgcgattttgtgtttttcggaagtcgtttgttgttgtagagttgtacgaattagttatggtgttgtgggagttttcgcggtagtgtagtagttggatattttgcgagggtttttgttggttgttgttgttgttcgttatgttatttatcgtagttcgttcggtgaagttcgttgttttttttatttttttaagtgattgttaaacgtttatcggttggaattgttttggtaagtttagaattttcgttttcgattttttaatttcgtagaagaatacgcgtatttagtatagattagtttattttagcgcgtttttttagttttttattttttattgttttagatttttaatattatttatttttatttagagaaataaggggaattgttgtaggttcgggggtgaggggtggttttgggatgggtagaaagtgtaggtgtagtaggaaatttttgtatgtttgcgtttatattggagttgcgaggattttgagaaatattaaacgggatggttttttgggtttattgttttgaaagagtattaattttaggggaaatattgaaatagaagttttgttattattaaagaaaaaagttttattaggatgaggaagaaataattttatgagaaagaatgagcgagaaagtaataaattaaatggtgattgtaggggaatcgttgatttttggtaaaggtgttatgaggtcgtattggtttttcgttgaagattaggttatatagattttagaggagttgggttttaatagaatttttttttttttttttttttttttttttttttttttttttttttttttatttatttattttttttttttttttattttttttttttttaggcggtaaaagatattggttttgtagtttagatatgtttttttttttgtttttttaagttttaaggtagtataggggagttgagaaaaagaatattttgcgggttttttaggtcggagtgggtatgattgaggttggttaggttttatgtaggcgagtcgagggcggaatcgattttagtgggcgttgatttttttatttttggataggtttttgtggagtgggttaggtattttttttgttcgttcgggtttttttagattttgacggcgaacgtttggtaggtttcgttttgttgaagttttttaattaaatagggttagaggatgggagttgttgtatttttagttggtatagtatttcggtttgatagtttgtagtatattgggtagaattgtggtgtaatttttttggtattttaaatttcgttaatatgtttgggtattgttttttagg

SEQ ID NO: 72 - DNA, 3190 bp, Artificial Sequence
  chemically treated genomic DNA (Homo sapiens)
gggttggcgggtattgagttggggttattacgtttttttagagcgtttgcggaggtggcgaaggtttggagagtatacgaggcggaattcggatcgagtgagttttttgagtcgtttgcgtgggacgtagggagagggcgaataacgtttttaggcgttgaatgtaggggtaaggagttagcgagggtggttggagtaggttttgttagttgttattaagtttttttataggtttgggggtttggggttttttggaaagattttttcgtcgcgttgattagtacggggttcgttttcgtattttgaaggttgtcgcggtttttcgttatttataattaagtttaagattaaggttgtaagttgaggtcggggtattgataacgggaatgaagttataggggaagaggataattgggacgggttggatttatatttgatattcgggaaatttttagagcgtgtggtgtttttgttagcggtagttattggtggagttgaggttatcgttattgtcgtcgttggcgttttgtttttggaattttttagtaagatggtatttattgtttgttttttttcgattagtatttttagtcgcgttttttttttttcgggatacgtattagttatatattgtggggagaagatgggttatgtaaatgtaagttaacgcgtttttttagttatttttgtataatgtaataggaatagcgattcgcgcgtacgaatcgggtagtgtgcgcgtgtgtgtgttcgcgtgtgtgagcgcgtgtgttagcgtgcgttttcgcgcgggcgtgcgtttgggtggatttttgcgtggtttgggaggtaaatcgggcgtttttttaagtcgttttaatatgatttaggtttttaaatacgtgaaagcggtagatataatagggatgcgaaggaaataaaaaataattggggaagtggtgttaagttatttaggttttgaattgaggacgagtagtgcggtcgcgtttggggcgcgttcggaaattatttttagtttgtggcggttattgttttatttaaatttttttgcggggagagttgagcggatttttggggggttggttttgggttagttttaaatttttcggttgtatttcgcgtggttttatcgacggcgcgtttcggcgtagtttttggcgcgggttcgtttttttttttttgtttagatttagttttatcggatttgttataatatgatagtaatttattggaggtaggaagagtagtacgaaataagatgagaaaattaaaaatatttttttttttttaaatagagacgtgtatttagttttttttatttgtttgtttgttttttatattattttttaatttttggaaagagattgcgaagtggaaacgttgtttgtatagaaattaggttttttagttgttaagattgttttttaatttttaggttgaatttttttttgttcgttgtaatttatggggaaatttaataacgtttttgttagaagtagttaggttgaaggaagaaagtgggggtgtttaaattaattttattaaattttggattatttttttagttaaagttatttaaggtggtttaggatgagggaattagtgatggggtgaggagtggggggtatattattaaggttgtttgtatttgaaataacgttattttggttgagaggtttgttgtattttattttttaattttatatttcgattattttttagtgtttaagtaatagatttttttttttggtagtatattattaagtaggtatggggaattttttttttagggtttagatggtgatattatttttaaggattggtggtaggaacggtatgtgtcgggtagatagagagaaggttagggtggtatttgtcgggttagttaggcgttttttaattttttttagagaggatagggttaaaagttaagtttgattttgttttttggaaattattgggtagtagtcgcgttttttaagtattttttaaattagaaaagtaggagggatttcgggagagagggagggaatgagggagggagagaaagagggttttaggagcggagcgcgttagagcgcgagggacggagggagaggaggagcgcgggagttgcggaggcgatttcgcgaatttattattgtaaatatattcgggggtgttaggaggggtaggggtgggggtcgcggcgtttatattagttcggtcgcgtcggattgaggtagtagtgtggtttgagtagtttttagatttacgtcgggcgggcgtagtatttggagcgagttttgcgttcgttttcgcgtagcgtcgtacgttcggtttcgagttgttcgtatatacgcgtcggaggagagttcgtttagttttttcgtcgagtttcgggattttttaaattcgaggagtttcggcgtcgcggggtagttttttgtcgtttttttcgttcgttgtattttttttggggttcgttggtttggcgaagcggagagggggaggcggaggaggagagaaggcgggggtcgcggcggtcgaagttaagagaaagtggtatgttcgaattttggaggcggtggtggcggaggacgggggaagacgatgtcgtagtttcgtaggggacgtaggcgagagtaagcgaggcgagttgggcgtttcggtttcggttcgttgcggggaggcgcgcgtcgttttgaggtttcggttttcgtattttcgcgtttcgacgttgcgggcgatagggtttggttttagtagtcgtcgtcgtcgtcgtcgtcgttattcggaggatttagtaaaagtttggatttgggggagggcgcggcgttgagcgggattattattagggttggaaggagatttcgagaatttttgtaggtaacgcgcgtttttaattttttttttttatgtttcgtcgttgcgttttcgtttttttttagagttttttttggttttcgcgggtttggtagaaagtaagagggaggcgaagtttaagatttcggggatgagtatcgagcgttggtagattattagttacgttagaggggtagttgtgttgagaggtaaatttttttaggagtgggtgagaatttttagttttagttggtgttttattttgtagttttttggaaatttggaacgtgaatttaggggtttttagtattttttagtttagagaaatggtttatggattttattt

SEQ ID NO: 73 - DNA, 3190 bp, Artificial Sequence
  chemically treated genomic DNA (Homo sapiens)
aagtgaaatttatgaattatttttttggattgaagaatattaaaagtttttggatttacgttttaaatttttaaagagttataagatgaggtattagttggggttgagggtttttatttatttttgggggaatttgttttttagtatagttgtttttttaacgtgattagtgatttgttagcgttcggtgtttattttcgggattttgaatttcgttttttttttattttttgttagattcgcgagggttaggaagggttttgggaggaagcgggagcgtagcggcggggtatggaagaagagggttgggggcgcgcgttatttgtaaaggttttcgaggtttttttttagttttggtggtaatttcgtttagcgtcgcgtttttttttagatttaaatttttgttgggtttttcgggtggcggcggcggcgacggcggcggttgttggagttaagttttgtcgttcgtagcgtcggggcgcgggggtgcggaggtcggagttttagagcggcgcgcgttttttcgtagcgggtcggggtcggggcgtttagttcgtttcgtttgttttcgtttacgttttttacggagttgcggtatcgttttttttcgtttttcgttattatcgtttttagggttcgggtatgttatttttttttggtttcggtcgtcgcgattttcgtttttttttttttttcgttttttttttttcgtttcgttaagttaacgaattttaaaagaagtatagcgagcggggaaggcggtagaaagttgtttcgcggcgtcggagtttttcggatttggaggatttcgggattcggcgggagagttaggcgggttttttttcgacgcgtgtgtgcggatagttcggagtcgggcgtgcggcgttgcgcgggggcgggcgtagggttcgttttaagtgttgcgttcgttcggcgtgggtttggaggttgtttagattatattattgttttaattcgacgcggtcgggttaatgtaggcgtcgcggtttttatttttattttttttgatattttcggatatgtttatagtaatgaattcgcgggatcgttttcgtagttttcgcgtttttttttttttttcgtttttcgcgttttggcgcgtttcgtttttggagtttttttttttttttttttttattttttttttttttttcggagttttttttatttttttggtttaaagaatgtttgggaggcgcggttgttatttagtgatttttaagaggtaaagttagatttggtttttaattttgttttttttgaaaagagttgaagagcgtttggttaattcggtagatgttattttgattttttttttatttattcggtatatgtcgtttttattattagtttttagggataatgttattatttgaattttgaaaggagaattttttatatttgtttaatggtgtattgttaagagggaggatttattatttagatattgagaaatgatcgaaatgtgagattagagggtaaaatatagtaaattttttaattaaaatggcgttattttaaatgtaggtaattttggtgatgtgttttttattttttattttattattagtttttttattttggattattttaaatgattttaattgggggagtaatttaaaatttaataggattaatttaaatatttttattttttttttttaatttggttgtttttggtaagagcgttgttaaatttttttatagattgtagcggataaagaaagatttagtttaaagattaggaaatagttttgatagttaagaagtttgatttttgtataggtaacgtttttatttcgtagtttttttttaaaggttaaagggtaatgtaaaaaataaataaataagtaaaaaaagttaggtgtacgtttttatttaggaaggaggagatgtttttggtttttttattttatttcgtgttgttttttttgtttttagtaagttgttgttatgttgtaataagttcggtgaggttgaatttgaatagaagagggagaacgagttcgcgttaagagttacgtcgagacgcgtcgtcggtggggttacgcgagatgtaatcggagagtttaaaattagtttaggattaattttttagggattcgtttaatttttttcgtagaagagtttaagtggggtagtggtcgttataggttgaggatgattttcggacgcgttttaggcgcgatcgtattattcgtttttagtttaaagtttgagtgatttggtattatttttttaattgttttttatttttttcgtatttttgttgtgtttatcgtttttacgtatttgagagtttaaattatgttaagacgatttggagaaacgttcgatttgttttttaagttacgtaaggatttatttagacgtacgttcgcgcggagacgtacgttggtatacgcgtttatatacgcgagtatatatacgcgtatattattcggttcgtgcgcgcgggtcgttgtttttgttgtattatgtaaaggtggttgggaaagcgcgttgatttatatttatatagtttattttttttttatagtatgtgattaatacgtatttcggggaggagggagcgcggttgggggtgttaatcggaagggaatagatagtgagtgttattttgttgggaggttttagaagtaaagcgttaacgacgatagtagcggtggttttagttttattagtaattgtcgttggtaggagtattatacgttttaggagtttttcgggtattaagtatgggtttagttcgttttagttattttttttttttatggttttattttcgttgttagtatttcgattttagtttgtaattttgattttgggtttgattataaatgacgaaagatcgcggtagtttttaaagtgcgggagcgagtttcgtattggttagcgcggcggagggatttttttaggaggttttaagtttttaagtttgtggagagatttggtaatagttggtaaggtttgttttagttattttcgttggttttttgtttttgtatttagcgtttgagggcgttattcgttttttttttgcgttttacgtaagcggtttaaggaatttattcgattcggatttcgtttcgtatgttttttaagttttcgttattttcgtaggcgttttagaaaggcgtgatggttttagtttagtgttcgttagttt

SEQ ID NO: 74 - DNA, 2308 bp, Artificial Sequence
  chemically treated genomic DNA (Homo sapiens)
taagggttaagtaatgatgtataaacggggtttattgtttaaatttatagaaagtaaaacgtggaaaattagtaattttaattgatagtgtatatttaaagaatttatatcggtcgggcgcggtggtttacgtttgtaattttagtattttgggaggtcgaggcgggaggattatttgaggttaagagatcgagattagtttgattaatatggtgaaatttcgtttttattgaaaatataaaaaaattagttaggcgtggtggtatatgtttgtagttttagttattcgggagggtgaggtaggagaattgtttgaatttaggagatagaggttgtagtgagtcgagatcgcgttattgtattcgtttgggagatagagcgagatttcgttttaaaataaaaaataaataaaaagaatttatttaatagaattaagtattaatataataaatacgaagaattttagatttttggtttttaaaaaatatataaagatgatatttttttaaaatatttttataaaatatattgagattgtgatgttttatattgattgtatgaaaataatgaaaaagaattagtattgttttattataaaagttttattaatgtaaatttataaatttttttttaaatattttgagttaattttaattttatgatagaaatttattatttttagtaaaaatagttggtatttgggaaattaaaggtttaaaaattaagaatagtaattaaagaaatttgataaaatagtttttttaaaatttttatttatattataaggggaaattttgattacgtttttttttttttattaatcgtagaatttaatattaaggattatataattttatattttttttcgagaaaaagtaaaggttttgtgttgtagtaataacgtaagatatggagggaagttttatttaagatttttttgtttgttttttttttaaagttattttagaatattagggagggttgagaggtaaggtatgaagggcgtaatatttaatatgagtaacgcgtgtgatgtatttggttaaaatgtatatagaggatttgtttttgtttttagatagaagtttttcgttttgtagttatgagggttaattgttgaggttttatagttttttttttttttatattcggatcgttacgttttttatttattatttcgatgtagaggtagatttaggatttttgtatttgttaaggatttttcggtaagtttacggggcgggagtggttataagacggagttcgtttggttttggttttttcggtttatataagtttgttttttttttaatttttaatttttatagttttttatttttttattttcgatttattttgcgttatcgacgtttttggttttcgtttgtagtaagtttatttttattattatttttcgtataaaagtttgtatttattaggttaaagaggggaattaacgtttgtaggaatcgttttatcgaatcgtttggtcgcgttttttgttagattttatttgtcgttgcggatcgtatataattattttcggtatgtttcgcgtacgtattattttttttatttcgtttttttttcgtttaaatacgtgattttttttcgttttcgtttacgtttattttcgtttttttatttttttttaggaaggaggagggagttgggggtgttaaaagcgtagcgatttttttttttttttcgttttcgtttttgtatttttcgttataatgtttttcgggtcgttagcgtttcgacgttttttgggaaaatagtttatttttttttttttttttttttttgtttttaattaattagttattcgttagagagggatatgcgtagtgagtgtttttcgttttttttattcgaatttttttttttttttaagtagagagattttagtagtagtagtagttgatgatgaagagagaggtagtggtagagggggggtattttttatttttatttttaaagggataggatattaattttattttattttaattttgaatttaggggggtggggggaaggcggttgagtttttttttttattttttagttttgagttttgagagggggattgagtttgagagaggagaaggagttttttttttttcgaaaatttttatttacgatttttatttttttatttttttaattcgtttttttttttttattttttttttttttggtcgtgagaggaggagagaaagaaattaaaagttttttagtaatatagattttttgttgttgttgttgttgttgttgttgttgttgttgttgttgttgttattgttg

SEQ ID NO: 75 - DNA, 2308 bp, Artificial Sequence
  chemically treated genomic DNA (Homo sapiens)
tagtagtagtagtagtagtagtaatagtagtagtagtagtaatagtagtagtaaagggtttgtgttgttaagaggtttttggttttttttttttttttttttacggttaaagaggaggagggtggagggagggaggcgagttggaggggtgagggggtaggagtcgtggatgggggttttcgaagaagaagaaattttttttttttttttaggtttaattttttttttagggtttagggttggagggtgggggaaggaatttagtcgttttttttttatttttttgaatttaaggttgaagtggggtagaattagtgttttgtttttttaaaaatagaaataaaaggtgttttttttttgttattgtttttttttttattattagttgttgttgttgttggggtttttttgtttgggggggagggggggttcgggtagaagagacgggaggtatttattgcgtatgtttttttttgacgggtggttggttggttgaaggtaggaggagggggaggggaggaaatgagttatttttttagaaggcgtcgaggcgttagcgattcggaagatattgtagcgggaggtataggagcgggggcggggaggaggaggaagtcgttacgtttttaatatttttagttttttttttttttttaagggaaagtggaggaacggaagtgggcgtggacggagacgaaaggaggttacgtgtttgggcgggagaggggcggggtgggagaggtagtgcgtgcgcggggtatgtcgggagtggttgtgtacggttcgtagcggtaggtgaagtttagtagaggacgcggttaggcgattcggtgaagcgatttttgtaggcgttggtttttttttttgatttggtaaatgtaggtttttatgcgagaggtaatggtgggggtaaatttgttgtaaacgaaggttaggggcgtcggtggcgtaaggtgaatcgaaagtgggaggatggaaggttgtggagattgggaattgggaagggggtaggtttgtataggtcgggaaggttaggattaggcgagtttcgttttgtggttattttcgtttcgtgagtttgtcgaggaatttttgataagtgtagggattttgagtttatttttgtatcggggtagtaggtgaggagcgtgacggttcgagtgtaagagagaagggaattgtgaagttttagtaattgatttttatgattgtaggacggaggatttttatttagggatagagataagttttttgtatgtattttgattagatgtattatacgcgttgtttatattggatattgcgttttttatgttttattttttaattttttttggtattttggagtggttttggggaaggagtaggtagggaagttttgagtggagtttttttttatgttttgcgttgttgttataatataaagtttttgttttttttcggagagggatgtgggattgtgtagtttttaatgttgagttttacgattgatgaaggagaagggacgtgattaaagtttttttttatagtgtagatgagagttttaaaaggattgttttgttaagtttttttggttattatttttagtttttgagtttttggttttttaaatgttagttgtttttgttgaaaataatgaatttttattataaaattagaattaatttaaaatatttaagaaaggatttataaatttatattagtaaagtttttatagtgaaatagtgttggtttttttttattgtttttatataattaatataaagtattatagttttaatatgttttgtaaagatattttgaaggaatattatttttgtatgttttttaaaaattaagaatttaaaatttttcgtatttattatgttggtatttaattttgttgggtgggttttttttgtttgttttttgttttgagacggagtttcgttttgttttttagacgagtgtagtggcgcgatttcggtttattgtaatttttgttttttgggtttaagtagtttttttgttttattttttcgagtagttgaaattataggtatgtgttattacgtttggttaatttttttgtgtttttagtagggacggggttttattatgttggttaggttggtttcgattttttgattttaaatgattttttcgtttcggttttttaaagtgttgggattataggcgtgagttatcgcgttcggtcggtgtaggttttttaggtgtatattattagttaaagttattaattttttacgttttgttttttgtaagtttgggtagtggatttcgtttatgtattattgtttagttttta

SEQ ID NO: 76 - DNA, 2441 bp, Artificial Sequence
  chemically treated genomic DNA (Homo sapiens)
ttgatatggttttgatgttagaggagaaatatggtttgggggtttttgttaatttaggttttttaggtttttattatcgtggggtttttggtattacgttttttagtatttttgatgttggttttgattcggaaacgttgcgtgtgtttaggtttttggtggagagagaagtagtttttgagggatttgtttttgagagggttttatttagggagtgatcgatgtttaggcgtggttaggtttattgttttttgtttttgtttttttttgtttgtgttttggtggttgaggatttagtaggtttttttatgtttgttttttttatgttgagtgagttgggcggtcggggttcgaggtgtgattaggtagttttgatttttatatgttttagaagggttggtatttagttagggagtcgtcgttttttttgtatggagtaaaagtaaacgtttttttttatttgttaggtttttgttggagttttttttacgtagtgatagaaagagttatcgtgggtgttttttttagcgagtgtttaaagatgatggtggggtgggtgggtttggggttgatttttttttttagtttttttgaggggtttatggttggtgataagtgagcggcggtgtttgggtatcggttggttgggggattttgattagtgtggttttaggatttttattttgtatttagtttgtattaggtagcgtttagttgtttttacgtttattttggttaaatttgttgttttaggtgatttagattgcggggggataggtaatggggatgagattgggttttatagtttttttattgtagtagtatagttttcgggagttgtcgagacgtatatatggtttatttagattcgagttaatttttatttaggatagtttcgagatttacgtttttcggaagtttgtgaagttttgcgttacggtgtggtaagaggatagttagttagatttgtttagtttattttagggtcgcgtgggggtggtagttgtaaaatatatgatttttattttgatagtgtttttttaaaaaattaaagtcgtatttcgtttttttggttagtaagaaatttaaaagggaaatagtaagtgtttggtttttcggttacgtttttttgttttcgtttttatttttaaatttacgataagtaggggagatcgttttcgttttaggttagtgtttgatttatataattcgttagttttatttgtttagtttcggtttttttgtttagggagtttgtggaatcggaaaagttttcggttcgtgggcgaaacgttaggtgcgttggtttcgtcgttttttttttagttttgttttcgtttcgcgtggttttcgtgtcgtttttttttttttttttgttggtagtggaatggacgttgtaggcggaattaacgtcgttgttgcgttttgtaatcgcgtttcgcgtatgttttttggtttcgtgtttcgtttttttattttgcgggttcgagttttttgggttgagttttttggtttttttgggttttttttgtgttttagggagtaggtagggggattagtatataattatttggagttttcgtggtttaggtagatttagtcgaaattttgtgtgcgttggtgtagaaggtggaggttatttcggagttattcggatcgtgtttttttttttagaggggtgaggggattttgtgtggttatttatttttaatttggaggtaggtatgggagtaaatgtggggtatatagaggtttagaaaagtatttcgggtttattgttcgggtcgtgttcgtttttttattttttttttattttttcgtggtttttaggtatttcgtatttattttattttttttttttttttaggagttcggttaggtaggtcggggtttttcgaaaggagtattgacgagcgttgtgttttttaatttggttttgtggggatagagtaggggttttcgtagtttgattttcgttttttagaatttgggtatttttttttttttttagttttgttgattttgtttgtttttagtgagggaagaatagtggtttttagttagggtgttcgttagaattatttggagtaggttagtttttagaggttcgggtagggtatagtttttaatagtttagttttttttggtttaggacgtttttgatcgtgtttttcgtttttggtatggttttgttttgttttcgtttttagtttttgtttgttattaattttttattttttatttggggttaggcgggattgaaagttagggaggggttggttgaggttagggttggggcggtttttggtagatgttttcgtgttcgttattttaggtattagcgtgggtatttgggtatttagtttcgtgttggagttgatggttgaggtagggagggtatcggtgttgttagggagtttttggttattttttgagggtgg

SEQ ID NO: 77 - DNA, 2441 bp, Artificial Sequence
  chemically treated genomic DNA (Homo sapiens)
ttatttttagagggtggttaagagttttttggtagtatcgatgttttttttgttttagttattagttttagtacggggttggatgtttaaatgtttacgttggtgtttgggatgacgggtacgagggtatttgttaagaatcgttttagttttggttttaattagtttttttttggtttttagtttcgtttggttttaggtggagagtgaagggttagtgatagataggagttgggagcgggggtagagtaaagttatgttagaggcgagagatacggttaggggcgttttggattagggagagttgagttgttgggagttgtgttttgttcgggtttttgggggttgatttgttttaggtggttttaacgggtattttggttaagagttattgttttttttttattgggagtagatagaattaataaggttgaggaagaaggaaaatgtttaggttttggggaacggaagttagattgcgggggtttttgttttgtttttataaaattaggttgaggggtataacgttcgttagtgtttttttcgggagatttcggtttgtttgatcgagtttttggaaggaaggggaaagtgagatgggtgcgggatgtttggagattacggggaggtgggggagaaatgggggagcgggtacggttcgggtaatgagttcgggatgtttttttggatttttgtgtattttatatttgtttttatatttgtttttaagttaagggtaaataattatatagaatttttttatttttttagaaaggaaaatacggttcgggtggtttcggagtggtttttattttttatattaacgtatatagggtttcggttgggtttgtttgggttacggaggttttaggtggttgtgtgttggtttttttgtttgttttttggggtataagggaagtttaaggaaattaaaaagtttagtttaaggagttcgaattcgtagggtaaaggagcgggatacggggttaagaagtatgcgcggggcgcgattgtaaaacgtagtagcgacgttagtttcgtttgtaacgtttattttattgttagtaagaaaaaaaagggaaacggtacgggggttacgcggggcggaggtaaagttgaggggagggcggcggggttagcgtatttggcgtttcgtttacggatcgagagttttttcggttttataaattttttgggtagggaggtcgggattgggtaagtggagttgacgggttatatgaattagatattagtttggggcggaaacgattttttttatttgtcgtgggtttaaaaatgagggcgggggtaaaaaaacgtagtcggaggattagatatttattgttttttttttaggttttttgttggttagggaggcggggtgcggttttgattttttaaagggatattgttaagataaaaattatatgttttataattattatttttacgcggttttggagtgggttggataggtttgattggttgtttttttgttatatcgtggcgtagaattttataagttttcgggggacgtgaatttcgggattgttttaagtgagggttgattcgggtttgggtgggttatgtgtgcgtttcggtagttttcgggagttgtgttgttgtagtggggaggttgtggagtttaattttatttttattgtttgttttttcgtagtttgggttatttggggtaatagatttggttaaggtggacgtgagggtagttgaacgttgtttaatgtaggttgggtgtagggtggagattttgaagttatattggttaaagttttttagttagtcggtgtttaggtatcgtcgtttatttattattaattatgaattttttaagagggttggggagaagagttagttttagatttatttattttattattatttttaggtattcgttggagagaatatttacggtggttttttttgttattacgtggaaggggttttaataggaatttggtaggtgaggaggagcgtttgtttttgttttatgtagagaggacggcggttttttggttgggtgttagtttttttggggtatgtggaggttagagttgtttggttatatttcggatttcggtcgtttagtttatttagtataagagggataaatatggagggatttattggatttttagttattagaatataaatagggaggggtaaaaataagggataataaatttagttacgtttgagtatcgattattttttaggtgaaatttttttagaggtaaattttttaggggttgtttttttttttattaaaaatttgagtatacgtagcgttttcgaattaaagttaatattaaaagtgttggagagcgtggtgttaggagttttacgatggtaggggtttagagggtttgggttgatagggatttttaagttatgttttttttttagtattaagattatgttag

SEQ ID NO: 78 - DNA, 2818 bp, Artificial Sequence
  chemically treated genomic DNA (Homo sapiens)
gaggtgggggcgttaacgataggcgtttagtaagtgtttttgaggtaattgtcgggttgttttggatttggtgaattttttcggggtttagtaaaggcggacgttgatcgggttaaggagtgggatttgtagtgttggattatttttttttaagcgtagaagtgtcgtgttcgtcggtttttaatagggtaagaggtttttttcgtcgtgtagagcgtagcgtttgcggcggggatagtagaggcgggacgggcgttacggagttttcgggttttcgcgcggttatttatttggttttagttattcgttgaaaaaggggcggacggtttttcgggattcgagtcgatatcgcgcgcggcgtcgcggggtaatttgaagtcgtgtgcgtgcgtgtgcgtttacgtaggggtttatttagcggttacgggtttttgaagattcgggtgggaagtgcggttcgggaaagcgtaagcgtttttatggtaacgagggcggacggcgttagagcgagtcgttttcggaagtgacgtgcggaaggggtgttcgggacgaagttatggttttggaggcggcgggagggtcgtcggaggaaacgttgttattgtggaaacggtaatgttgttaggcgacgcgtaggaggcgggggtcgaggtcgggcggtttttcgcggatttttcgagtttatagtttttaggttgtggaatcggagttgttatcgttcgagattttaaagtaaagtttagttttcggcgcggaagcggagggattttaggaattgtagttcgcggggtgggcgcggttttcgttttcggttagtttgtttggtttgcgtttgcgcgggttttcgtcgtttgggtttttagggattgtggtttcggcggtatgttttttgtttttttttgaagcgggagaagattcggtagaggcgttttgttcgttgtagtcgcgcgggtggaggaggtagagtttgaggtgtgatttcgattaagtttgacgtttttgtttttttagggagtaagttcggttgaaggtttacgtcgtagatcgggatatcgaggcgtggtagcgagatttcgttttttcgggtttgtagagggtcgggggcgttgacgtgtttttcgtgaaaggggatagtgttcgcgtttgtgtttttttggtggtgtttagtttttttgagttcgaggtaatttgggaggacgtcgagttcgaggcgggtttttcggtgggttcgggcgtgcggttttcgggatagggagtagtgtaagcgtagaattcggtttttcgttttgtaggatgttattaatagtttggggagttggtcgggcgcggtggtttacgtttgtaattttagtattttgggaggttgaggcgggggaattatttgaggtcgggagttcgagattagtttgattaatatggagaaattcggtttttattaaaaatataaaattagacgggtgtggtggtatatatttgtaattttagttattcggaaggttgaggcgggagaatcgtttgaattcgggaggcggaggttgcggtgagttaatattacgttattgtattttagtttcggtaataagagcgaaattttattttaaaaaaaaaaaaaaaaaaaaaaagtttggggagttttggaagggaaaaaaaggtaaaaattaagggaattttgtgattattaagaattagtttatgagttttatttttaagtttgattgttattttgggttttttattttagtgatttgtttattacgtttttagttgtttaagttggagatttgtatttttttgggttttttcgtttttttcgcgtttagttgtatattagttcgtttttattttgttttttaaatgtcgttggaatttgtttttttgtttgttttttttttgttttttttttggttgtgttattattatttttgtgggtttttgagtagtatttttatgggtgttttggtttaaatgtttttttttagtggttttttttttatattgttagtagattaatttttttaaaaagtaagtattttttttaaaagtaataagttttttttttttttttttttttttttttttttttttttttttttttttttttttttttttttttgtttttttttttttttttttttttttttttattttgtgtttaggttgaagtgtagtggtataattttggtttattgttaagatttgattttaattttttggatttaagtgatttttttattttagtttgagtagttaggattataggtgtgagttattatattcggtttatttttttattttttgtagagataggattttattatgttgtttagggtggtttttagtttttgggtttaagggatttttttattttggtttttttaagtgttgagattataggtgggaattattatatttagtttataagtttttttagaatattgaagtgttttttttatgattttatggtgaataaagtttattttggttggtatggttttaaggttcgttatgatttgttttttgcgtaatttaatatgacgttggaggtttagtttttattattatttttagttttttttattttttatagtttattgtgagttttttacgtgtttgttacgttgtatttggcggtttgatttttgtagtaatgttttttttggaagggtttttatttggttaattattatttatttttttgggtttagtttagatatgacgttttttattaagtttttttttattttataagacgaggatttgttttttagtattatgttttagttcgtttgggttgttgtaatagaatattttagattgg

SEQ ID NO: 79 - DNA, 2818 bp, Artificial Sequence
  chemically treated genomic DNA (Homo sapiens)
ttagtttaaggtattttattatagtagtttaaacggattaagatatggtgttgagggataagttttcgttttgtgggatgagagggagtttagtggaggacgttatgtttaaattgagtttaaagagatgagtagtagttagttagatggaaatttttttagaagaaatattattgtaaaggttaggtcgttaaatatagcgtagtaaatacgtgagggatttatagtgggttgtaggaggtgggaagaattgagaatagtggtgagggttgagtttttagcgttatattaaattacgtaggggataggttatgacgggttttgaagttatgttaattagagtgaattttatttattatgaggttatgagaagggtattttaatgttttaagaggatttgtgggttgggtgtggtggtttttatttgtaattttagtatttggggaggttaaggtaggaggattttttgagtttaggagttggagattattttgggtaatatagtgagattttgtttttataaaaaataaaaaaataagtcgggtgtagtggtttatatttgtggttttagttatttaggttaaggtgggaggattatttgagtttaggaggttgagattagattttgatagtgagttaagattatgttattgtattttagtttgggtatagagtgggggaaggggaaaggaaggaaagagagatagagagaggaaggaagggaggaaggaaggaaggaaggaagggagggagggagggagggaggggatttgttgtttttgaggaaaatatttgttttttaggaaaattggtttgttggtagtatggaaaagaaattattgaggaggaatatttgagttagggtatttatgaaaatgttgtttaggaatttataggagtgatggtggtatagttagggaaggagtagaggggaaatagataaggggatagattttagcgatatttaagaggtagaataaaagcgagttagtgtgtaattggacgcgagaggaacggaggggtttaggaggatgtagatttttagtttgggtaattgggagcgtggtggataggttattgagatgaagaatttaagataataattagatttgaagataaagtttatgagttgatttttaatagttatagaatttttttaatttttgttttttttttttttttaagattttttagattttttttttttttttttttttttgagatggagtttcgtttttgttgtcgaggttggagtgtaatggcgtgatgttggtttatcgtaattttcgtttttcgggtttaagcgattttttcgttttagtttttcgagtagttgggattataggtatatgttattatattcgtttaattttgtatttttagtagagatcgggtttttttatgttggttaggttggtttcgaattttcgattttaggtgattttttcgttttagttttttaaagtgttgggattgtaggcgtgagttatcgcgttcggttaattttttagattattaatgatattttataaaacgagaagtcgggttttacgtttgtattgttttttgtttcggagatcgtacgttcgagtttatcgaggggttcgtttcgagttcggcgtttttttaggttatttcgagtttagggaagttgagtattattagggaagtataagcgcggatattgtttttttttacgaaggatacgttaacgttttcgattttttgtagattcgagaaggcggggtttcgttgttacgtttcggtgtttcggtttacgacgtgggtttttagtcgagtttgttttttaggaggatagaagcgttaaatttggtcggggttatattttagattttgttttttttattcgcgcggttgtagcggatagagcgtttttgtcgggttttttttcgttttaagggaaagtaagggatatatcgtcgaggttatagtttttaggagtttaggcggcggagattcgcgtaagcgtaggttagataaattggtcggaagcgagaatcgcgtttatttcgcggattataatttttgagattttttcgttttcgcgtcggaaattgggttttgttttggagtttcgggcggtggtagtttcgattttatagtttgaagattatgagttcggagggttcgcgaagggtcgttcggtttcggttttcgttttttgcgcgtcgtttgatagtattatcgtttttatagtgatagcgtttttttcggcggttttttcgtcgtttttagggttatggtttcgtttcgggtatttttttcgtacgttattttcggaagcgattcgttttgacgtcgttcgttttcgttgttatggagacgtttgcgttttttcgggtcgtattttttattcgggtttttagaagttcgtggtcgttgggtgagtttttgcgtgaacgtatacgtacgtatacggttttaggttgtttcgcggcgtcgcgcgcgatatcggttcggatttcgggaggtcgttcgttttttttttagcggatagttgaggttaggtaagtgatcgcgcgaggattcgggaatttcgtgacgttcgtttcgtttttgttgttttcgtcgtaagcgttgcgttttgtacggcgagaggggttttttgttttgttgagagtcggcgggtacggtatttttgcgtttggaaaagggtggtttagtattgtaggttttattttttggttcggttagcgttcgtttttgttgaatttcgaaaggatttattaggtttaggatagttcggtagttgttttaggagtatttattgagcgtttgtcgttgacgtttttatttt

SEQ ID NO: 80 - DNA, 2368 bp, Artificial Sequence
  chemically treated genomic DNA (Homo sapiens)
aatgcgtatattttatttgtattttgatttaaataaattgttaaaaaaaattataatataattgggtatttgaatatagattagatataaaatgatattaaggaattgtgaattattaaatgtgataatagtattgtggttatatgttaaaaagaagaaaatttttattttgtagatatatattttgaaatatttatgtttaaagtgatattatgtttagaatttgttttagaaataattttaaggttgggaagcgggtaagataaagacgaaataagattggttatgagttgttaattgtggaatttgagtgaggattagtatatggggtttgtattatattattttatttttttaaatgttcgaaattttttattaaagttaagataaagttaaattataaagattgttttttaaataaaaaaggggtcgggcgtttacgtttgtaattttagtattttgggaggtcgaggcgggcggattacgaggttaggaaatttagattattttggttaatacggtgaaatttcgtttttattaaaaatataaaaaattagtcgggcgtggtggcgggcgtttgtagttttagttattcgggaggttgaggtaggagaatggcgtgagttcgggaggcggagtttgtagtgagtcgagatcgcgttattgtattttagtttgggcgatagagcgagattttgttttattttttaaaaaaaggaatagaatagaaaggtattaagaagaattagaaaaaaaatttattgtttttgatttattttttgtttttttttaaacgttttggtgtggagaaaaggatgagtattggtaataagtattatagtttgttattggggtgggcgggattgatgttttttttatttaaatttttgatattttgtttattataaatttttttgtaataattgttttttaaaatgttgtattaaaatgttattttttttgattgttgaggaattttgtatttttttaaattttgcgttcgcgttttggttgggagatgtggggaaaattttgggagtttaggatagggagaggtaagtttttatagaagtgggaatggttaatagttttttgagaagatagttttttttttggggaggtagaggaagttttaagaatatataaagataggagagtggaagggtcggttagtttggagatattaaaagagatttcggatgaggataggggttgattcgaaagtttcgtttgatttcgggttgtaggagggggcgtgggacgggggcggagtcgttggcgatgataatagttttacgtgatcggttaatattgagtgttgtttcgttttggcgttagagtcgtcgtggttcgttttattttcggcggtggtatttgttttcggtggttttgaggacgtgtgggttaggggcggtttcgaaattaggaagcggagggggagtaggtaaggaattcggcggggggtttttggggttggtgtgagggagtggtttcggtttgcggatgtttatttcgggggagtcgtgcggagaagtaatcggttcgcgatgtagttttcgggtttcgcggcgggttcgcgagttttttttgagcggagaggtgttcggttcggagggagtcggcggttttggggttacgatttttcggaaatatttgtttacgttattagcgtaagttttttcgatatttttgtttcgtattttttggtgtagaaaatggtggttagtttgcggggcggggcggttgaggcggggggcgagggtggcgaggagggttagggttagggttagggttagggtttcggggcggggcgggggaggggtcggatggcggtagtttttagttagcgttttgttgtagtagtttttattttttttatttcggtagtttgtaggtttgcggggttaagtgtcgcggcggcgtatttcgcgttaagaattcggaggaggagattgtaaggataggtttaggtcggtgcgagggtcggtggtgaggcgggggtcggaacgtgaggaaagtttagtttgagattttaatttatgtttttattttcgtttttttttattttatgtaatttttttttttttatacgttattttcgttttttattttgttgtttgcggaagtttggagatggatttatagggaaaatggtgggttttgcggaagggaggggttcggattgagggtattttatagggtatattggttttttaggtggaaaaaaatgaaatgttagagtataaagttaagtttagggttttgaattttaaaaggtgtttagtagggtttttgtttttagtgtttattagtttattaagaatttagtttatttttttttttttgttttttaggagtaatggagttt

SEQ ID NO: 81 - DNA, 2368 bp, Artificial Sequence
  chemically treated genomic DNA (Homo sapiens)
ggattttattatttttaggagataagagagagaaaatgggttgaatttttggtggattgataagtattgaggatagaggttttattaggtattttttaaaatttagagttttggatttgattttatattttaatattttatttttttttatttgagaagttagtatgttttgtggggtgtttttaattcgagtttttttttttcgtaaagtttattattttttttgtagatttatttttaggttttcgtaggtagtaaaatggaggacgaggatggcgtgtgggaaggggagggttgtatggggtagaggggggcgagggtgaaggtatggattagggttttagattgggttttttttacgtttcggttttcgttttattatcgattttcgtatcgatttgggtttatttttgtagttttttttttcggatttttgacgcgaggtgcgtcgtcgcgatatttagtttcgtagatttgtagattgtcggggtgggggaagtgggggttgttgtagtagaacgttagttaggaattatcgttattcggtttttttttcgtttcgtttcgaggttttggttttggttttggttttggtttttttcgttattttcgtttttcgttttagtcgtttcgtttcgtaagttgattattattttttgtattaagaagtgcggggtaggggtgtcggaaaagtttgcgttgatggcgtaggtaggtgttttcgaagggtcgtagttttaggatcgtcggtttttttcgggtcgggtattttttcgtttaaggaaggttcgcgggttcgtcgcggggttcgggggttgtatcgcggatcgattgttttttcgtacggttttttcggggtgggtattcgtaggtcggagttatttttttatattaattttagggatttttcgtcgggttttttatttgtttttttttcgttttttaatttcggggtcgtttttggtttatacgtttttagggttatcgggagtaggtattatcgtcgagaatggaacgagttacgacggttttgacgttagagcgagataatatttagtgttggtcggttacgtggggttgttgttatcgttaacggtttcgttttcgttttacgtttttttttgtagttcggagttaggcggggttttcgggttagtttttatttttattcggagttttttttagtatttttagattggtcggtttttttatttttttgtttttgtgtatttttgggattttttttgtttttttaagagggaagttgtttttttagggagttgttggttatttttatttttgtggggatttgtttttttttgttttgggtttttaggattttttttatattttttaattaggacgcgggcgtagaatttaaaggggtgtaaaattttttagtagttaagaaaaataatattttaatgtaatattttaaaaaataattattgtaagaaaatttatgatgagtaagatgttaaaaatttaaataaagagagtattagtttcgtttattttaatggtaaattgtggtatttgttattaatgtttatttttttttttatattagaacgtttggggggggataggaaatgagttaaggatagtggattttttttttaattttttttaatatttttttgttttgtttttttttttggggggtggggtagagtttcgttttgtcgtttaggttggagtgtagtggcgcgatttcggtttattgtaagtttcgtttttcgggtttacgttatttttttgttttagtttttcgagtagttgggattataggcgttcgttattacgttcggttaattttttgtatttttagtagagacggggttttatcgtgttagttaggatggtttggattttttgatttcgtgattcgttcgtttcggttttttaaagtgttgggattataggcgtgagcgttcggttttttttttgtttaagaaatagtttttatagtttaattttattttaattttaatggaaaatttcgaatatttggaaaaatggaatagtataatgtaaattttatgtattagtttttatttagattttatagttaataatttatggttaattttatttcgtttttattttattcgttttttaattttaaaattatttttgaagtaaattttagatataatattattttaggtataaatattttaaagtatgtatttataagataagggtttttttttttttagtatataattataatattgttgttatatttaataatttataattttttaatattattttatgtttaatttgtgtttaaatatttaattgtattatagttttttttaatagtttgtttgaattaagatataaataagatatgcgtatt

SEQ ID NO: 82 - DNA, 2429 bp, Artificial Sequence
  chemically treated genomic DNA (Homo sapiens)
gtcgttaaggttgtggcgttacgtttttaagcggatacggtagaagttttggggttagatataagatttttaagtttgaatgggtagcgtaaaatttagataagtttttcggtagtgtcgttaatttttgttaggtatagaagatatagcgagaatcgtgagtcgttacgaaagtttaaaatattgagttcgcgttttgttaagtagtaggcgtataaatttatattttcgagcgttttttggaggtttcgtttatttttttttttcgagtcggttagagatttggaagagggcgggttaagggtgaggagggtagtatgcgtatgcgcgtttaggatttagttagtgagttaataaggaatttcgcgagtgttgaaagtcggtggcgtaggtcgtcgttttggatgttggcgagatagatgttattttttagaggaagaggaggaggcggcgaagcgtttttttagttttagtttttttttcgttttttttttttttttttttaatttttcgtttttttttaaattagtcggttttttttgattttagtgattcgtttggtttcgtttattttcgtcgacgtgattttcgtcgtgaggtaagcgtcggtggaatttagagtttcgcggaagagtagaacgtttgggagtgtgtagtttttgggttcggtttaggttcgtcgcggaggcgcggcgtaggggagcgttcgggtgggagtttcgtttttttattagtttattgcgacgtagtatttaggtttaggttttttcgtttattttcgtcggattcgggtttttggtagtagcgggtgacgtagacggaatattatgtcgttcgcggtcgagttttcgttattttcgtttttcgagagcgcgttttttaagttcgtagtttcgatcgttagcggcgggagtaatagtagtaataaaggcggtttcgaaggcgtcgcggcgtaggcggttgcgtttgcggttagcgttggtttcgtagacgtcgagatggaggtgagggcgatttgcggtatggggagcgggtgtagcggggaggaggagttggttttttcgtcggatcgtggcgatcggacgtagagtcgggtttttttttttgtattagatttagttttatattttgtggatacgaaatgatgtttttatttttgtttttttgtttttattttattcgagttaagtaaaatggatttttggttttttatatttaaattatttgtttttttcgtgaattttgataaatatttgaacgtttttagtgaatagatgtttttggttatcgtggttcgggggatttatcgttttttttttattagatttttataatttttttttttatttttgaatgtggtttttagtttttattaaatttcggggaagggcgaggagatgattttttaggagcgggatgtacgggcggggtgaaggaggtatttaaaagtagcgcgttcgaggatttgggtttttttttttttttttcggtttttgtaggggcggtatttgttgtgggtagaaataatggcgagagttggatggtcgagtgcgtagtggggataagcggggcgtagttgtttttgtgaagggagagaaggttttttttaggtattattttattggaagggaagtaattaaggtagtagtagttgtttcggatttttcgtttaatttaggggggatgaataagtgtaggaatgaattagagaattaggcgtagttggttggtttttagttcggtatttttttttttttggtttttggttttaagaaaaaaaaaaattagtattattcgttgtcgagatttatgggtttgggttgggtaggggatgttgatagtattgagggggttggaaagatgggggaagttgttaggcgggtaaattggatatgtttttaggttttgtatttgggaataaagtaattgttttttttaatttttatttttttggttttcgatttgttttgagatattttgtgagtcggagtttaaagatttttgggatttttttatttttagatagaatgaaagtaatattgtttcgaagatgagttttgatgtagaattattatatagtaagaaaatggtagcgtaatttattattgaggtttttggtatagtagttatatttgggtagttggggttaagtaatattaatgttagtaattatttaaagaatttttagtggtgagggtaggtttagtgatataggaatttttgatagtttttgtagttttgagtgattaagataagattatttttaaattaaaatatatttagtgttgtttttttttttttaaggaaatggtttttttgggttattagggttttttaatttggatttttgttttaaggtttaaggggtttgatataaagtaattatgtgtaaatgtgtagttttttataaaaattgtttatagtttttt

SEQ ID NO: 83 - DNA, 2429 bp, Artificial Sequence
  chemically treated genomic DNA (Homo sapiens)
gaaaaattataaataatttttgtagagaattgtatatttatatataattgttttgtgttaaattttttaagttttggaatagaaatttaagttaaagagttttagtaatttaaaagaattatttttttaaggaaaaaaaagtaatattgaatatattttaatttggaagtaattttattttaattatttaaaattataggaattattaggagtttttatgttattaaatttatttttattattaaaagttttttaaatgattattaatattaatgttatttaattttagttatttaaatataattattgtgttaaaagttttaatggtaaattacgttattatttttttattgtataatgattttgtattaagatttattttcggagtagtattatttttattttgtttaaggataggaaaattttagaaatttttgggtttcgatttataaaatattttaaaataggtcgaaggttaagaaaataaaaattggaaggagtaattattttgtttttagatgtaaagtttggaagtatatttaatttattcgtttggtagttttttttatttttttagtttttttagtattgttagtattttttgtttaatttaaatttataagtttcggtagcgagtggtattaattttttttttttttaaggttagaggttaaaaagagaaaagtgtcggattgagagttaattaattgcgtttggttttttaatttatttttatatttatttattttttttaaattagacgggggattcgagatagttgttgttgttttggttgttttttttttagtggaatagtgtttgggaggggttttttttttttttatagaagtagttgcgtttcgtttatttttattgcgtattcggttatttagttttcgttattgtttttgtttataatagatatcgtttttgtaaggatcgggaagaagaaaaggaggtttaagttttcggacgcgttgtttttaaatgttttttttatttcgttcgtgtatttcgtttttaaggggttattttttcgttttttttcgaagtttggtggaaattaaaaattatatttagaggtaggagagggaattatgggagtttagtgggaaaaaaacgatgggtttttcgggttacggtaattaagaatatttgtttattgagagcgtttaaatatttgttaggatttacgaaagagataaataatttaaatgtgaggagttagaaatttattttgtttagttcgaatagggtaagaataagggagtaagagtgagagtattatttcgtatttatagggtgtgaagttgagtttggtgtagagagagaaattcggttttgcgttcgatcgttacgattcggcgagggagttagtttttttttttcgttgtattcgttttttatgtcgtaagtcgtttttatttttatttcggcgtttgcgggattagcgttggtcgtagacgtaatcgtttgcgtcgcgacgttttcggggtcgtttttgttgttgttgttgttttcgtcgttggcgatcgaggttgcgggtttggaaggcgcgttttcgggaggcgggggtggcggaggttcggtcgcggacgatatgatgtttcgtttgcgttattcgttgttgttagaggttcgagttcggcggggatggacggggaggtttaggtttggatgttacgtcgtaataaattggtggaggagcgagatttttattcgagcgtttttttgcgtcgcgttttcgcgacgggtttgagtcgggtttaggagttgtatatttttaaacgttttgttttttcgcggggttttaggttttatcggcgtttattttacggcgggaattacgtcgacgagggtgggcggggttagacgggttattgaggttaaggaaggtcggttgatttagagaagggcggagggttgggggaagggaaaaggaaaacgaaagagagattgaggttgggaaaacgtttcgtcgtttttttttttttttttggaagataatatttatttcgttagtatttaggacgacgatttacgttatcgatttttaatattcgcgagattttttattggtttattgattgggttttgagcgcgtatgcgtatattgttttttttatttttggttcgtttttttttagatttttagtcggttcgggagagaagagtgggcgggatttttagggagcgttcggaggtgtaggtttgtgcgtttgttgtttggtaggacgcgagtttagtgttttaggttttcgtaacggtttacggttttcgttgtgttttttgtgtttgataggggttggcggtattatcggaaaatttgtttgggttttgcgttgtttatttaaatttggaagttttgtgtttggttttaaaatttttgtcgtattcgtttagaggcgtgacgttatagttttgacgat

SEQ ID NO: 84 - DNA, 2284 bp, Artificial Sequence
  chemically treated genomic DNA (Homo sapiens)
tgtggtattgttttttgtatcgtagggtttttcgggatcgatagattttggataatagtagttgggaaatattttaaatatataatatatttttaatttttaaatattggagttgtggggtttttttttttttttttttttttttttgggggttggaggcggaattttttggaaaattttggtattttgtttttttattaattttattttttgtggttgtttttattaagatatattttttttttgataatttttttatattgtatttagtataatagatgtatttgtggatttattgggtttttattgggttttgggaatattgatgttattttatttaaaaattaatttaagtttaatgttttgatgaaaatgaaaatatatttatagggaagtaaatatttatagttatttagttttttaaatgttatatatattttattttatttaaagtgttttttttttttttttaattataaaataatttagtttatttttaggaagatttttttatttattgtttttagttatgttagtatattttcggttttaaggatagagaatagttaggagttatagtattttgttttttatttttcgtatgtttttttttaatttttattttttttttttttcgtgttgtttttttttttttttatgtaaagtagaataagaagattgttttttataaagataataggttttttttaattgtaaatgattatattataagtcgtatttgttagttaattagtgtatttaagtttttgttagcggatgttgaaatgatgtttgtaataattgattgggtttttgcgagtttagggatgtagatttttttttttttcgtttttcgtgcgagttttagtcgttaatgaaaatcgtatgaaatagattttttttttgttatgtaatcggtttttttttcgtttttcggttgatttgggtataatgttttttatgagagtggagatgtttgcggcgacggcggagttggggaaggggacgcggggattcgagagtacggaacgtttcgtttaggtggacgttagtttttcgtttgcgagtagtttagcgtatcgtttatttggttgcggacggggtggttttatttaattatgatttttttttttgaaacggagtaagattgaataatttattatacgacggatggcgagggaaggaaatgtaaaaaagaaaaggaaaagaaaaaaattggaattagatggttaaattttatattagtatcgagaggttgttaggagattttattttgttcgcggttgtttcggttttaggttcggtttttcggcgttcgcgggtttttattttttcgttcgtttagtttttttagttaggtgcggtcgttttcggattggttttttttggtcgagcgcggagagtagggttgggcgttggggttaagggaggggcggaggggcgcgcgtttgggtagggacgggggagggagattgggtggaatgaagtggggaaagataagagtggtagaagaaaaaaaaaattttcggttaggagaaaagtggtggattacgtagagagacgttatgaaattcgtagatttaatgaatgttatttaattttagtcgattggttgagtttcgttggtagcgtacgaagcgacgcggtttcgagataaaagcgagtgtagcgtcgcgtgttggggaaaaagtcgtatagcgtcggcgcggttcgggaggaaggggcgggggcgagtaggatagagttatagatttagagacgtttatttcgtcgtttatgttagttagcgtgttagcgcgtcgaggatcgggtttggtgggggcgggttgggtataaattaacgtgtatttttcgttattggaaacgtgggtgttttatgttgggggaattttttgggtttcggttttcgattttttagttttaattttttttttagtgttattaagtaagttattttcggagaaacgtttggaaagtaggaaagagtcgaagttcggggagtagttttgtttgttggttgtaggggttcggtttttagggttttgtgagataaggaaaaagaggttttgggtattgttttttatcgggttgaaattcgtgagaggtagtttcggcgcgggagtcggagtttgtatcgtttagagggggcgtagcgagcggtcgggacggaggggaggggttttatttttgagttttgtttgtatttggtggcgttttagtttgttgttttatttagttttttttgttttgtttattgtaattgggatttggtttcggttgttgt

SEQ ID NO: 85 - DNA, 2284 bp, Artificial Sequence
  chemically treated genomic DNA (Homo sapiens)
gtagtagtcgggattaggttttagttgtagtggataggatagaagggattgaatggggtagtaggttggggcgttattaggtgtaagtaaagtttagggatagggtttttttttttcgtttcggtcgttcgttgcgttttttttgggcggtgtaggtttcggttttcgcgtcggggttgttttttacggattttagttcggtgggaggtagtgtttagagtttttttttttttattttataaaattttaaaagtcgaatttttataattagtagataaaattgtttttcgagtttcggtttttttttgttttttaggcgttttttcgggaataatttatttagtggtattgggagaaaggttgggattggggggtcggggatcgaaatttaaaagatttttttagtatggagtatttacgtttttagtggcgggggatgtacgttggtttgtgtttagttcgtttttattaagttcggttttcgacgcgttgatacgttagttggtatgggcggcggggtgggcgtttttgggtttgtggttttgttttgttcgttttcgtttttttttttcggatcgcgtcggcgttgtgcggttttttttttagtacgcggcgttgtattcgtttttatttcggagtcgcgtcgtttcgtgcgttgttagcggggtttagttagtcggttggaattgagtagtatttattgaatttgcggattttatgacgtttttttgcgtggtttattattttttttttaatcggggatttttttttttttttgttatttttatttttttttattttattttatttagtttttttttttcgtttttgtttaaacgcgcgttttttcgttttttttttggttttagcgtttagttttgtttttcgcgttcggttagagggagttagttcggagacggtcgtatttggttggagaggttgggcgggcggaggggtggagattcgcggacgtcgggaagtcggatttggagtcggagtagtcgcgagtagaatggagttttttaatagtttttcggtgttgatgtgaaatttgattatttgattttagtttttttttttttttttttttttttgtatttttttttttcgttattcgtcgtgtagtgaattgtttagttttgtttcgttttaagagaggagattatgattgagtgaagttatttcgttcgtagttaggtaagcggtgcgttgagttgttcgtaggcgaggagttggcgtttatttgggcgaggcgtttcgtgttttcgggttttcgcgtttttttttttagtttcgtcgtcgtcgtaggtatttttatttttatgagaaatattgtgtttaagttagtcgaaaggcgagggagaagtcggttatataatagaaggggaatttgttttatacggtttttattagcgattgaaattcgtacggggggcgggggaaggaggggtttgtatttttgggttcgtagaaatttagttagttattgtagatattattttaatattcgttggtaaagatttaaatgtattgattaattgataggtgcggtttgtgatgtagttatttatagttgggaaaagtttattgtttttgtggaaggtagtttttttgttttgttttgtatggagaggagaggagataatacgaaagggaggaaaagtgagggttggggagaaatatgcggagaatgggaaatagaatattgtaatttttaattgttttttatttttaaaatcgaagatgtgttagtatgattaaaaatagtgaataggaagatttttttaggagtaaattgaattattttgtaattggaagggaagaaaaaatattttagataaaatgagatgtgtgtggtatttagaggattgggtggttgtggatatttgtttttttgtggatatatttttatttttattaaaatattaagtttggattagtttttaagtgaaataatattagtatttttaaaatttaataaaagtttagtggatttataggtatatttgttgtattaggtgtaatatggagagattgttagggggaaaatatattttaatagaaatagttatagagggtgaggttagtggagaaataaaatattagaattttttaaagaatttcgtttttaatttttaaaaaaaggaagagaaaaaaaaaaaaattttataattttagtgtttgggagttggagatgtattatatgtttagagtgttttttaattgttgttatttaaagtttgtcggtttcggggagttttacggtatagggagtaatgttata

SEQ ID NO: 86 - DNA, 2290 bp, Artificial Sequence
  chemically treated genomic DNA (Homo sapiens)
aatgtagtaatattcgggtttatttagtaatatagttattatttatatatatttaaaggttattaagataaggtagatgtaggatagtttttttattcgtttattaaaatggaaattttaggttagtttttataagaaatgggaaatttaagcgattttggcgaaacgatttttgagaaaattttttaagggtaataaaataatattttaaataaatagattttatttgagggaatggggatattatatagtaattgatattcgaatggttttaaatggattgattcgtcgtaagttttgaggttgagttaaatttttatgaagaattattaggaatagggttattagaaaattaagttttaaaagcgtttttgtttttgtcgaaggtattatattttggtatttttaagaatcgttttttgagggagggaataaaggagagtggataattcgtagtaaattttttttttatgtttttagaaaatgtagagacgataggatttgaaaatttttgttataaagatggtttttaaaaatgtatataattttaaatgattatttgggtagttataattgtatgtttatagttcgtatttagaggtatggttttacgttttggttttgaaggataataaggaggtttttaaggaaatgtcgtgagaaagattgttggttaagtattgttacggttattggaggagtatttgttagtgaatcgacgttggtttttttagttttattagtgtacgtatattagttcgtgtatttcggtcgtcgttggtaggttttattagttaagttggaggagtagttgtcgtaattacggtaagcgaattgaaattttagagtcggtttcgttcggtagagcgttcgcgtttttcgcgtagcgtacgtttcgcgcgtaaattcgagatgtgatcgcgagttgcgatttcgcgcggttgcgacgggttttatttaacgcgtacgaggggattattattgtttttgttttgggcgttcgcggttttatattattttcgtatataacgcggtcggtgttaagtttttaaacgtttcgagagttttaaggatcgcgcgcgcgaaggcgtcgtagtaagtgggtatatattagatattatttcggcgtgtttcgcgggagaagttagtgtatatattttttcgtaaggcggggttgttagtgtaatataggaattttgttttttttttagaaaagtttttttttttattttttttttaatatatttatttgcgttttaatagttttttttttgcgttatacgcggtcgtattcgggtacgtttacgttcgtgtacgttgttaggcgcgattgttttcgttcggttttcgtcgtttttaatttgtttgtgtttacgggaggggcggtgttatttttcgaggcgtttaattttttttattttcgtcgtaacgggttgagttttaggaatttcgcgggtataattttcgtcgtttttattagtgttttcgtttagagttcggattagggcgtattatttttattttgttagacgtagcgggggcgcgtatagattttagtttcggcgtttaaaatggattaggggtaaggcgcggacgtcgttttcgtttttacgtttttagtatttgtttgttgtgattcgaagttgtagttattacggttcgtgtcgttggtcgttagtattgtcgcggaggagtcgttcggggcgagtttcgcggagaggcggtggcggcggcggcggcgggaaaggggattggaagtcggcggaattttcgttttattcgcgtcgcgtcgcgtcgcgtcggtaatcgttttttttattcggtcggttattgttttagtgacgtttaggcgtcgcggtttcgtcgtttgtagcggggcgggaaggaggggtttgtttggaagagcgttaggaggcggggtcggcggcgagttcgcggcgtcgcggtcgtcgtcggcgcgtgttttgttcgatcgtttttcgggttcgtgtcggtagggagatgtcgggttttagtagtttagtttcgttttttcggattttcgagttttattaggttttttcgataaggtttttttggattcggtggagagcgttgagcgtttagaggaggttgattttaggtgtaagtttgtaaatttcgaggttcggggcgttaacggggagttagagtagttaacgtgggggttattttatgtgtttataaatgtatttataaatatatataagtatatatatatatgtgtgttttttttaaaaattttttttttttttttatttcgtagttaagg

SEQ ID NO: 87 - DNA, 2290 bp, Artificial Sequence
  chemically treated genomic DNA (Homo sapiens)
ttttggttgcgaagtagggggaaaaagagaatttttaaaagagatatatatatgtgtgtatatttatatatatttataaatatatttatgaatatataaagtaatttttacgttagttgttttgatttttcgttagcgtttcgggtttcgggatttgtaaatttgtatttggaattagttttttttgggcgtttaacgttttttatcgagtttagagaaattttgtcggggaagtttggtgagattcggaagttcggagggacggagttgagttgttgaagttcggtatttttttgtcggtacggattcgaagggcggtcgggtagggtacgcgtcggcggcggtcgcggcgtcgcgaattcgtcgtcggtttcgttttttggcgtttttttaagtaagtttttttttttcgtttcgttataaacggcgggatcgcggcgtttgggcgttattgaggtagtagtcggtcgggtgaggagggcggttgtcggcgcggcgcggcgcggcgcgggtggggcgggggtttcgtcggtttttagttttttttttcgtcgtcgtcgtcgttatcgttttttcgcggagttcgtttcgagcgattttttcgcggtagtgttgacggttagcggtacgagtcgtagtagttgtagtttcgagttatagtaggtaagtgttgggggcgtgggggcggggacggcgttcgcgttttgtttttggtttattttggacgtcgaggttaaggtttgtgcgcgttttcgttgcgtttagtagggtaggggtggtgcgttttagttcgaattttgggcgggaatattggtgggggcggcggaggttgtgttcgcgaagtttttagagtttagttcgttgcggcgggagtagagagaattgggcgtttcgggaggtggtatcgtttttttcgtgggtataagtaggttgggggcggcgggagtcgagcggggatagtcgcgtttggtagcgtgtacgggcgtggacgtgttcgggtgcggtcgcgtgtagcgtaagaaggaaattgttgagacgtaggtgagtgtattggagggaaagtgggggagggggtttttttagaaaaagggtaggatttttgtgttgtattggtaatttcgttttgcgggaggatgtgtgtattggtttttttcgcggaatacgtcggggtggtgtttggtgtgtgtttatttgttacggcgttttcgcgcgcgcggtttttggagttttcggggcgtttggagatttaatatcggtcgcgttgtgtgcggaggtggtgtagggtcgcgggcgtttagggtaggagtaatgatgattttttcgtgcgcgttaggtgaggttcgtcgtagtcgcgcgaggtcgtagttcgcggttatatttcgggtttgcgcgcgaggcgtgcgttgcgcgggaagcgcgggcgttttgtcgggcgaggtcggttttgggattttagttcgtttgtcgtggttgcggtagttgtttttttagtttggttggtagggtttgttagcggcggtcggggtgtacggattagtgtgcgtgtattggtgagattgggggagttagcgtcggtttattggtaggtgtttttttagtggtcgtgataatgtttagttagtagttttttttacggtatttttttaaaagtttttttgttattttttagggttagagcgtaaaattatgtttttagatgcgagttatgagtatgtagttgtagttgtttagatggttatttagaattgtgtgtatttttaaagattatttttatgataaagatttttaagttttatcgtttttatattttttgaaaatatgggaaaaggatttgttacgagttgtttatttttttttatttttttttttaaagaacggtttttagaagtgttaaaatgtaatattttcggtaaggataaaagcgtttttaaaatttaattttttagtggttttatttttaataattttttataaaaatttagtttagttttaaaatttacggcgaattagtttatttaaaattattcgaatattaattgttgtgtaatgtttttatttttttaagtaaaatttgtttgtttgaaatattgttttgttgtttttgaagagtttttttaagaatcgtttcgttagagtcgtttgaattttttattttttgtggaagttgatttggagtttttattttggtgagcgggtggaaaagttgttttgtatttattttgttttagtaatttttgggtatatataaatggtgattgtattgttgagtggattcgaatgttattgtatt

SEQ ID NO: 88 - DNA, 17968 bp, Artificial Sequence
  chemically treated genomic DNA (Homo sapiens)
ggttttcggaggtcgggattcgcggagggtttagtagtaggaagaaattttaggaggaagaaattttagatagatcgtcggcgaggtagcgcgggatttagttttaggcgtgcgcggacggtgtgcggagtgagtttttttaaaagtggagtttttgtgatgacgagtataggttcgtttgcgtgttcgtgggttgtttttttatcggtggtttttagtcgcggagagtagaattcggtagttttaggggttgtttgcgggagggtgttttttgttgtacgtgtgtgttcgttatgggtgtgtgtgtgtgtgtgttgggggggtgcgtttgtgtgtgtgtttgtgtgtgtgtacgcgtagtgtttgtttgtgtgtcgatttttgttttttttttacgtttttttttttttttttttttttttttttttgttttttttttcgtttttttcgtggttttttttttttgtttttgttcgtttgtgtgtgcgtgcgtttcgggatatatgtgttttgtgcgtcggagggtgggttttttgtacgtcggttttttttttggttagttttttttcgcgtttttgtttgggtcgtgtggtcggttggtagtcgtcgtttcggcggttttagtttgggggtttgtgaaggtttgggtaacgtgggtatcggcgtcggattcgtaggggtttttattttttttttattcggagtagtttttttgttaggttggatttagacgagcgttttttaattaaggataacggttttttaggcgtttatcgtttattcgtaggagggtgttcgtagagttttaagaaggtggttgttacgtttgtcgttttttgtttttatcgagaaatgtagttatagttcgacgtagggacggagaaggaagtcggtaaggggatggggtaagtatgtttgttttttaaaggttggtttttttggtcgagttattcgtttgatattttttttcggatgtcggtggtggtggtatggttttttcgtattttgtttgggttttggtttttgttttgattttttttttgttgtgtttgtttcgtttttgagaagtttggcggttttttagtgtggtttagtgttttttataaagaagattttttcgtttattagggagaaatttcgtggcggttcgcgttatgattgtttttttttttatatttttttttggatgattgggtagttgtggtgattttggagttttgggtttttatatttgtgtgggatagggaagttttttcggtttttatggtttaagtgatggttgtacgttcggtttaggaagaggcggaggtaagtttatcgtttttgatattggttttttaggaaaggcggtgttgtattttatttgtattttttttttgatttttgagggttaatcgtttttttcgtttttggggaaagtgttttttagtatcgaattttttggttgttacggatgttagggagttaacgggattgggttttggttgggtgtaggggaggttgcgttaggggtatttagtcggcggcgggttgggggtggggtgtattttgtttaaatttttcggtttttttggcgggtttttttgaacgtggcgtggattcgcgtataggttttgtttcgtaggtttttaggtgcgtttggtttttttttcgttttgtggggtaggtttttagtggtttttcgggcgtacgtttggatattattgttcgtttcgtcgtcgttttttacggttttaaagatatacgttgtttgtatgtgtttttgggggacgatagtgttatatgtggatatattggttttagttcggattcgtttttgtttttttttgttcgtgtcgtcggaagtcgtttcgggttgtcggagttttcgggttttggagatgaaggtaggtttttgtttttgttaggaaggagggaggtagtgggtttatgggtcggtgtttttgtagtcgatagtacgttttgcggttttggggatttttttgtgtttcggcgagatttttttcgttttattgtattggaattttattttcgattattcgttgggatttattatcggattttaagaggagttcgcgtagtttagtcggtatttcgaagttttttttttagtgggaatcgaagtagaagagcgattaaggaggtttttattataggatttttatgggttcgattatgggtttttcgtaggtttttttggtagttttttttttattcgtcgtttcgggttgcgttttcgtcgtcgtcgtcgtaatttttagtatcgtcgttttaggtttcgtagtcgtcgcgtcgtcgttattttttaaagggttcgtagtttgattttgcggagtaagggggggtggagcgggggagtcggtttcgttagcgcgtatgcgcgaggttcgagtcgtcgtttgggttatagtgaaagttatcgttgttcggggatgggtttttgatatttggggaagtaggagttttgtgtgatcgtgcgtttgagtttgggttgagattagttttggttagggtagttattaggacggttttcggaggtcgggattcgcggagggtttagtagtaggaagaaattttaggaggaagaaattttagatagatcgtcggcgaggtagcgcgggattttagttttaggcgtgcgcggacggtgtgcgggtgagtttttttaaaagtggagtttttgtgatgacgagtataggttcgtttgcgtgttcgtgggttgtttttttatcggtggtttttagtcgcggagagtagaattcggtagttttaggggttgtttgcgggagggtgttttttgttgtacgtgtgtgttcgttatgggtgtgtgtgtgtgtgtgttggggggggtgcgtttgtgtgtgtgtttgtgtgtgtgcgcgcgtagtgtttgtttgtgtgtcgatttttgttttttttttacgtttttttttttttttttttttttttttttttttttttgttttttttttcgtttttttcgtggttttttttttttgtttttgttcgtttgtgtgtgcgtgcgtttcgggatatatgtgttttgtgcgtcggagggtgggttttttgtacgtcggttttttttttggttagttttttttcgcgtttttgtttgggtcgtgtggtcggttggtagtcgtcgtttcggcggttttagtttgggggtttgtgaaggtttgggtaacgtgggtatcggcgtcggattcgtaggggtttttattttttttttattcggagtagtttttttgttaggttggatttagacgagcgttttttaattaaggataacggttttttaggcgtttatcgtttattcgtaggagggtgttcgtagagttttaagaaggtggttgttacgtttgtcgttttttgtttttatcgagaaatgtagttatagttcgacgtagggacggagaaggaagtcggtaaggggatggggtaagtatgtttgttttttaaaggttggtttttttggtcgagttattcgtttgatattttttttcggatgtcggtggtggtggtatggttttttcgtattttgtttgggttttggtttttgttttgattttttttttgttgtgtttgtttcgtttttgagaagtttggcggttttttagtgtggtttagtgttttttataaagaagattttttcgtttattagggagaaatttcgtggcggttcgcgttatgattgtttttttttttatatttttttttggatgattgggtagttgtggtgattttggagttttgggtttttatatttgtgtgggatagggaagttttttcggtttttatggtttaagtgatggttgtacgttcggtttaggaagaggcggaggtaagtttatcgtttttgatattggttttttaggaaaggcggtgttgtattttatttgtattttttttttgatttttgagggttaatcgtttttttcgtttttggggaaagtgttttttagtatcgaattttttggttgttacggatgttaggagttaacgggattgggttttggttgggtgtaggggaggttgcgttaggggtatttagtcggcggcgggttgggggtggggtgtattttgtttaaatttttcggtttttttggcgggtttttttgaacgtggcgtggattcgcgtataggttttgtttcgtaggtttttaggtgcgtttggtttttttttcgttttgtggggtaggtttttagtggtttttcgggcgtacgtttggatattattgttcgtttcgtcgtcgttttttacggttttaaagatatacgttgtttgtatgtgtttttgggggacgatagtgttatatgtggatatattggttttagttcggattcgtttttgtttttttttgttcgtgtcgtcggaagtcgtttcgggttgtcggagttttcgggttttggagatgaaggtaggtttttgtttttgttaggaaggagggaggtagtgggtttatgggtcggtgtttttgtagtcgatagtacgttttgcggttttggggatttttttgtgtttcggcgagatttttttcgttttattgtattggaattttattttcgattattcgttgggatttattatcggattttaagaggagttcgcgtagtttagtcggtatttcgaagttttttttttagtgggaatcgaagtagaagagcgattaaggaggtttttattataggatttttatgggttcgattatgggtttttcgtaggtttttttggtagttttttttttattcgtcgtttcgggttgcgttttcgtcgtcgtcgtcgtaatttttagtatcgtcgttttaggtttcgtagtcgtcgcgtcgtcgttattttttaaagggttcgtagtttgattttgcggagtaagggggggtggagcgggggagtcggtttcgttagcgcgtatgcgcgaggttcgagtcgtcgtttgggttatagtgaaagttatcgttgttcggggatgggtttttgatatttggggaagtaggagttttgtgtgatcgtgcgtttgagtttgggttgagattagttttggttagggtagttattaggacggttttcggaggtcgggattcgcggagggtttagtagtaggaagaaattttaggaggaagaaattttagatagatcgtcggcgaggtagcgcgggattttagttttaggcgtgcgcggacggtgtgcgggtgagtttttttaaaagtggagtttttgtgatgacgagtataggttcgtttgcgtgttcgtgggttgtttttttatcggtggtttttagtcgcggagagtagaattcggtagttttaggggttgtttgcgggagggtgttttttgttgtacgtgtgtgttcgttatgggtgtgtgtgtgtgtgtgttggggggggtgcgtttgtgtgtgtgtttgtgtgtgtgcgcgcgtagtgtttgtttgtgtgtcgatttttgttttttttttacgtttttttttttttttttttttttttttttttttttttttttttcgttttttttttttttgttttttttttcgtttttttcgtggttttttttttttgtttttgttcgtttgtgtgtgcgtgcgtttcgggatatatgtgttttgtgcgtcggagggtgggttttttgtacgtcggttttttttttggttagttttttttcgcgtttttgtttgggtcgtgtggtcggttggtagtcgtcgtttcggcggttttagtttgggggtttgtgaaggtttgggtaacgtgggtatcggcgtcggattcgtaggggtttttattttttttttattcggagtagtttttttgttaggttggatttagacgagcgttttttaattaaggataacggttttttaggcgtttatcgtttattcgtaggagggtgttcgtagagttttaagaaggtggttgttacgtttgtcgttttttgtttttatcgagaaatgtagttatagttcgacgtagggacggagaaggaagtcggtaaggggatggggtaagtatgtttgttttttaaaggttggtttttttggtcgagttattcgtttgatattttttttcggatgtcggtggtggtggtatggttttttcgtattttgtttgggttttggtttttgttttgattttttttttgttgtgtttgtttcgtttttgagaagtttggcggttttttagtgtggtttagtgttttttataaagaagattttttcgtttattagggagaaatttcgtggcggttcgcgttatgattgtttttttttttatatttttttttggatgattgggtagttgtggtgattttggagttttgggtttttatatttgtgtgggatagggaagttttttcggtttttatggtttaagtgatggttgtacgttcggtttaggaagaggcggaggtaagtttatcgtttttgatattggttttttaggaaaggcggtgttgtattttatttgtattttttttttgatttttgagggttaatcgtttttttcgtttttggggaaagtgttttttagtatcgaatgttttggttgttacggatgttagggagttaacgggattgggttttggttgggtgtaggggaggttgcgttaggggtatttagtcggcggcgggttgggggtggggtgtattttgtttaaatttttcggtttttttggcgggtttttttgaacgtggcgtggattcgcgtataggtttttgtttcgtaggtttttaggtgcgtttggtttttttttcgttttgtggggtaggtttttagtggtttttcgggcgtacgtttggatattattgttcgtttcgtcgtcgttttttacggttttaaagatatacgttgtttgtatgtgtttttgggggacgatagtgttatatgtggatatattggttttagttcggattcgtttttgtttttttttgttcgtgtcgtcggaagtcgtttcgggttgtcggagttttcgggttttggagatgaaggtaggtttttgtttttgttaggaaggagggaggtagtgggtttatgggtcggtgtttttgtagtcgatagtacgttttgcggttttggggatttttttgtgtttcggcgagatttttttcgttttattgtattggaattttattttcgattatacgttgggatttattatcggattttaagaggagttcgcgtagtttagtcggtatttcgaagttttttttttagtgggaatcgaagtagaagagcgattaaggaggtttttattataggatttatgggttcgattatgggtttttcgtaggtttttttggtagttttttttttattcgtcgtttcgggttgcgttttcgtcgtcgtcgtcgtaatttttagtatcgtcgttttaggtttcgtagtcgtcgcgtcgtcgttattttttaaagggttcgtagtttgattttgcggagtaagggggggtggagcgggggagtcggtttcgttagcgcgtatgcgcgaggttcgagtcgtcgtttgggttatagtgaaagttatcgttgttcggggatgggtttttgatatttggggaagtaggagttttgtgtgatcgtgcgtttgagtttgggttgagattagttttggttagggtagttattaggacggttttcggaggtcgggattcgcggagggtttagtagtaggaagaaattttaggaggaagaaattttagatagatcgtcggcgaggtagcgcgggattttagttttaggcgtgcgcggacggtgtgcgggtgagtttttttaaaagtggagtttttgtgatgacgagtataggttcgtttgcgtgttcgtgggttgtttttttatcggtggtttttagtcgcggagagtagaattcggtagttttaggggttgtttgcgggagggtgttttttgttgtacgtgtgtgttcgttatgggtgtgtgtgtgtgtgtgttggggggggtgcgtttgtgtgtgtgtttgtgtgtgtgcgcgcgtagtgtttgtttgtgtgtcgatttttgttttttttttacgtttttttttttttttttttttttttttttttttttttttgttttttttttcgtttttttcgtggttttttttttttgtttttgttcgtttgtgtgtgcgtgcgtttcgggatatatgtgttttgtgcgtcggagggtgggttttttgtacgtcggttttttttttggttagttttttttcgcgtttttgtttgggtcgtgtggtcggttggtagtcgtcgtttcggcggttttagtttgggggtttgtgaaggtttgggtaacgtgggtatcggcgtcggattcgtaggggtttttattttttttttattcggagtagtttttttgttaggttggatttagacgagcgttttttaattaaggataacggttttttaggcgtttatcgtttattcgtaggagggtgttcgtagagttttaagaaggtggttgttacgtttgtcgttttttgtttttatcgagaaatgtagttatagttcgacgtagggacggagaaggaagtcggtaaggggatggggtaagtatgtttgttttttaaaggttggtttttttggtcgagttattcgtttgatattttttttcggatgtcggtggtggtggtatggttttttcgtattttgtttgggttttggtttttgttttgattttttttttgttgtgtttgtttcgtttttgagaagtttggcggttttttagtgtggtttagtgttttttataaagaagattttttcgtttattagggagaaatttcgtggcggttcgcgttatgattgtttttttttttatatttttttttggatgattgggtagttgtggtgattttggagttttgggtttttatatttgtgtgggatagggaagttttttgggtttttatggtttaagtgatggttgtacgttcggtttaggaagaggcggaggtaagtttatcgtttttgatattggttttttaggaaaggcggtgttgtattttatatgtattttttttttgatttttgagggttaatcgtttttttcgtttttggggaaagtgttttttagtatcgaattttttggttgttacggatgttagggagttaacgggattgggttttggttgggtgtaggggaggttgcgttaggggtatttagtcggcggcgggttgggggtggggtgtattttgtttaaattttttggtttttttggcgggtttttttgaacgtggcgtggattcgcgtataggttttgtttcgtaggtttttaggtgcgtttggtttttttttcgttttgtggggtaggtttttagtggtttttcgggcgtacgtttggatattattgttcgtttcgtcgtcgttttttacggttttaaagatatacgttgtttgtatgtgtttttgggggacgatagtgttatatgtggatatattggttttagttcggattcgtttttgtttttttttgttcgtgtcgtcggaagtcgtttcgggttgtcggagttttcgggttttggagatgaaggtaggtttttgtttttgttaggaaggagggaggtagtgggtttatgggtcggtgtttttgtagtcgatagtacgttttgcggttttggggatttttttgtgtttcggcgagatttttttcgttttattgtattggaattttattttcgattattcgttgggatttattatcggattttaagaggagttcgcgtagtttagtcggtatttcgaagttttttttttagtgggaatcgaagtagaagagcgattaaggaggtttttattataggatttttatgggttcgattttgggtttttcgtaggtttttttggtagttttttttttattcgtcgtttcgggttgcgttttcgtcgtcgtcgtcgtaatttttagtatcgtcgttttaggtttcgtagtcgtcgcgtcgtcgttattttttaaagggttcgtagtttgattttgcggagtaacggggggtggagcgggggagtcggtttcgttagcgcgtatgcgcgaggttcgagtcgtcgtttgggttatagtgaaagttatcgttgttcggggatgggtttttgatatttggggaagtaggagttttgtgtgatcgtgcgtttgagtttgggttgagattagttttggttagggtagttattaggacggttttcggaggtcgggattcgcggagggtttagtagtaggaagaaattttaggaggaagaaattttagatagatcgtcggcgaggtagcgcgggattttagttttaggcgtgcgcggacggtgtgcgggtgagtttttttaaaagtggagtttttgtgatgacgagtataggttcgtttgcgtgttcgtgggttgtttttttatcggtggtttttagtcgcggagagtagaattcggtagttttaggggttgtttgcgggagggtgttttttgttgtacgtgtgtgttcgttatgggtgtgtgtgtgtgtgtgttggggggggtgcgtttgtgtgtgtgtttgtgtgtgtgcgcgcgtagtgtttgtttgtgtgtcgatttttgttttttttttacgtttttttttttttttttttttttttttttttttttttttttttttttttgttttttttttcgtttttttcgtggttttttttttttgtttttgttcgtttgtgtgtgcgtgcgtttcgggatatatgtgttttgtgcgtcggagggtgggttttttgtacgtcggttttttttttggttagttttttttcgcgtttttgtttgggtcgtgtggtcggttggtagtcgtcgtttcggcggttttagtttgggggtttgtgaaggtttgggtaacgtgggtatcggcgtcggattcgtaggggtttttattttttttttattcggagtagtttttttgttaggttggatttagacgagcgttttttaattaaggataacggttttttaggcgtttatcgtttattcgtaggagggtgttcgtagagttttaagaaggtggttgttacgtttgtcgttttttgtttttatcgagaaatgtagttatagttcgacgtagggacggagaaggaagtcggtaaggggatggggtaagtatgtttgttttttaaaggttggtttttttggttgagttattcgtttgatattttttttcggatgtcggtggtggtggtatggttttttcgtattttgtttgggttttggtttttgttttgattttttttttgttgtgtttgtttcgtttttgagaagtttggcggttttttagtgtggtttagtgttttttataaagaagattttttcgtttattagggagaaatttcgtggcggttcgcgttatgtttgtttttttttttatatttttttttggatgattgggtagttgtggtgattttggagttttgggtttttatatttgtgtgggatagggaagttttttcggtttttatggtttaagtgatggttgtacgttcggtttaggaagaggcggaggtaagtttatcgtttttgatattggttttttaggaaaggcggtgttgtattttatttgtattttttttttgatttttgagagttaatcgtttttttcgtttttggggaaagtgttttttagtatcgaatgttttggttgttacggatgttagggagttaacgggattgggttttggttgggtgtaggggaggttgcgttaggggtatttagtcggcggcgggttgggggtggggtgtattttgtttaaatttttcggtttttttggcgggtttttttgaacgtggcgtggattcgcgtataggttttgtttcgtaggtttttaggtgcgtttggtttttttttcgttttgtggggtaggtttttagtggtttttcgggcgtacgtttggatattattgttcgtttcgtcgtcgttttttacggttttaaagatatacgttgtttgtatgtgtttttgggggacgatagtgttatatgtggatacgttggttttagttcggattcgtttttgtttttttttgttcgtgtcgtcggaagtcgtttcgggttgtcggagttttcgggttttggagatgaaggtaggtttttgtttttgttaggaaggagggaggtagtgggtttatgggtcggtgtttttgtagtcgatagtacgttttgcggttttggggatttttttgtgtttcggcgagatttttttcgttttattgtattggaattttattttcgattattcgttgggatttattatcggattttaagaggagttcgcgtagtttagtcggtatttcgaagttttttttttagtgggaatcgaagtagaagagcgattaaggaggtttttattataggatttttatgggttcgattatgggtttttcgtaggtttttttggtagttttttttttattcgtcgtttcgggttgcgttttcgtcgtcgtcgtcgtaatttttagtatcgtcgttttaggtttcgtagtcgtcgcgtcgtcgttattttttaaagggttcgtagtttgattttgcggagtaagggggggtggagcgggggagtcggtttcgttagcgcgtatgcgcgaggttcgagtcgtcgtttgggttatagtgaaagttatcgttgttcggggatgggtttttgatatttggggaagtaggagttttgtgtgatcgtgcgtttgagtttgggttgagattagttttggttagggtagttattaggacggttttcggaggtcgggattcgcggagggtttagtagtaggaagaaattttaggaggaagaaattttagatagatcgtcggcgaggtagcgcgggattttagttttaggcgtgcgcggacggtgtgcgggtgagtttttttaaaagtggagtttttgtgatgacgagtataggttcgtttgcgtgttcgtgggttgtttttttatcggtggtttttagtcgcggagagtagaattcggtagttttaggggttgtttgcgggagggtgttttttgttgtacgtgtgtgttcgttatgggtgtgtgtgtgtgtgtgttgggggggtgcgtttgtgtgtgtgtttgtgtgtgtgcgcgcgtagtgtttgtttgtgtgtcgatttttgttttttttttacgttttttttttttttttttttttttttttttttttttttttttttttttttttttcgtttttttcgtggttttttttttttgtttttgttcgtttgtgtgtgcgtgcgtttcgggatatatgtgttttgtgcgtcggagggtgggttttttgtacgtcggttttttttttggttagttttttttcgcgtttttgtttgggtcgtgtggtcggttggtagtcgtcgtttcggcggttttagtttgggggtttgtgaaggtttgggtaacgtgggtatcggcgtcggattcgtaggggtttttattttttttttattcggagtagtttttttgttaggttggatttagacgagcgttttttaattaaggataacggttttttaggcgtttatcgtttattcgtaggagggtgttcgtagagttttaagaaggtggttgttacgtttgtcgttttttgtttttatcgagaaatgtagttatagttcgacgtagggacggagaaggaagtcggtaaggggatggggtaagtatgtttgttttttaaaggttggtttttttggtcgagttattcgtttgatattttttttcggatgtcggtggtggtggtatggttttttcgtattttgtttgggttttggtttttgtttttattttttttttgttgtgtttgtttcgtttttgagaagtttggcggttttttagtgtggtttagtgttttttataaagaagattttttcgtttattagggagaaatttcgtggcggttcgcgttatgattgtttttttttttatatttttttttggatgattgggtagttgtggtgattttggagttttgggtttttatatttgtgtgggatagggaagttttttcggtttttatggtttaagtgatggttgtacgttcggtttaggaagaggcggaggtaagtttatcgtttttgatattggttttttaggaaaggcggtgttgtattttatttgtattttttttttgatttttgagggttaatcgtttttttcgtttttggggaaagtgttttttagtatcgaattttttggttgttacggatgttagggagttaacgggattgggttttggttgggtgtaggggaggttgcgttaggggtatttagtcggcggcgggttgggggtggggtgtattttgtttaaatttttcggtttttttggcgggtttttttgaacgtggcgtggattcgcgtataggttttgtttcgtaggtttttaggtgcgtttggtttttttttcgttttgtggggtaggtttttagtggtttttcgggcgtacgtttggatattattgttcgtttcgtcgtcgttttttacggttttaaagatatacgttgtttgtatgtgtttttgggggacgacggtgttatatgtggatatattggttttagttcggattcgtttttgtttttttttgttcgtgtcgtcggaagtcgtttcgggttgtcggagttttcgggttttggagatgaaggtaggtttttgtttttgttaggaaggagggaggtagtgggtttatgggtcggtgtttttgtagtcgatagtacgttttgcggttttggggatttttttgtgtttcggcgagatttttttcgttttattgtattggaattttattttcgattattcgttgggatttattatcggattttaagaggatattttaagaggagttcgcgtagtttagtcggtatttcgaagttttttttttagtgggaatcgaagtagaagagcgattaaggaggtttttattataggatttttatgggttcgattttgggtttttcgtaggtttttttggtagttttttttttattcgtcgtttcgggttgcgttttcgtcgtcgtcgtcgtaatttttagtatcgtcgttttaggtttcgtagtcgtcgcgtcgtcgttattttttaaagggttcgtagtttgattttgcggagtaagggggggtggagcgggggagtcggtttcgttagcgcgtatgcgcgaggttcgagtcgtcgtttgggttatagtgaaagttatcgttgttcggggatgggtttttgatatttggggaagtaggagttttgtgtgatcgtgcgtttgagtttgggttgagattagttttggttagggtagttattaggacggttttcggaggtcgggattcgcggagggtttagtagtaggaagaaattttaggaggaagaaattttagatagatcgtcggcgaggtagcgcgggattttagttttaggcgtgcgcggacggtgtgcgggtgagtttttttaaaagtggagtttttgtgatgacgagtataggttcgtttgcgtgttcgtgggcggtttttttatcgttggtttttagtcgcggagagtagaattcggtagttttaggggttgtttgcgggagggtgttttttgttgtacgtgtgtgttcgttatgggtgtgtgtgtttgtgtgttggggggggtgcgtttgtgtgtgtgcgcgcgtagtgtttgtttgtgtgcggatttttgttttttttttaggttttttttttttttttttttttttttttcgtttttttcgtggttttttttttttgtttttgttcgtttgtgtgtgcgtgcgtttcgggatatatgtgttttgtgcgtcggagggtgggttttttgtacgtcggttttttttttggttagttttttttcgcgtttttgtttgggtcgtgtggtcggttggtagtcgtcgtttcggcggttttagtttgggggtttgtgaaggtttgggtaacgtgggtatcggcgtcggattcgtaggggtttttattttttttttattcggagtagtttttttgttaggttggatttagacgagcgttttttaattaaggataacggttttttaggcgtttatcgtttattcgtaggagggtgttcgtagagttttaagaaggtggttgttacgtttgtcgttttttgtttttatcgagaaatgtagttatagttcgacgtagggacggagaaggaagtcggtaaggggatggggtaagtatgtttgttttttaaaggttggtttttttggtcgagttattcgtttgatattttttttcggatgtcggtggtggtggtatggttttttcgtattttgtttgggttttggtttttgttttgattttttttttgttgtgtttgtttcgtttttgagaagtttggcggttttttagtgtggtttagtgttttttataaagaagattttttcgtttattagggagaaatttcgtggcggttcgcgttatgtttgtttttttttttatatttttttttggatgattgggtagttgtggtgattttggagttttgggtttttatatttgtgtgggatagggaagttttttcggtttttatggtttaagtgatggttgtacgttcggtttaggaagaggcggaggtaagtttatcgtttttgatattggttttttaggaaaggcggtgttgtattttatttgtattttttttttgatttttgagggttaatcgtttttttcgtttttggggaaagtgttttttagtatcgaattttttggttgttacggatgttagggagttaacgggattgggttttggttgggtgtaggggaggttgcgttaggggtatttagtcggcggcgggttgggggtggggtgtattttgtttaaatttttcggtttttttggcgggtttttttgaacgtggcgtggattcgcgtataggttttgtttcgtaggtttttaggtgcgtttggtttttttttcgttttgtggggtaggtttttagtggtttttcgggcgtacgtttggatattattgttcgtttcgtcgtcgttttttacggttttaaagatatacgttgtttgtatgtgtttttgggggacgatagtgttatatgtggatatattggttttagttcggattcgtttttgtttttttttgttcgtgtcgtcggaagtcgtttcgggatgtcggagttttcgggttttggagatgaaggtaggtttttgtttttgttaggaaggagggaggtagtgggtttatgggtcggtgtttttgtagtcgatagtacgttttgcggttttggggatttttttgtgtttcggcgagatttttttcgttttattgtattggaattttattttcgattattcgttgggatttatcgtcggattttaagaggagttcgcgtagtttagtcggtatttcgaagttttttttttagcgggaacggaagtagaagagcgattaaggaggtttttattataggatttttatgggttcgattttgggtttttcgtaggtttttttggtagttttttttttattcgtcgtttcgggttgcgtcgtcgtcgtcgtcgtcgtaatttttagtatcgtcgttttaggtttcgtagtcgtcgcgtcgtcgttattttttaaagggttcgtagtttgattttgcggagtaagggggggtggagcggggggagtcggtttcgttagcgcgtaggcgcgaggttcgagtcgtcgtttgggttatagtgaaagttatcgttgttcggggatgggtttttgatatttggggaagtaggagttttgtgtgatcgtgcgtttgagtttgggttgagattagttttggttagggtagttattaggacggttttcggaggtcgggattcgcggagggtttagtagtaggaagaaattttaggaggaagaaattttagatagatcgtcggcgaggtagcgcgggattttagtttttggcgtgcgcggacggtgtgcgggtgagtttttttaaaagtggagtttttgtgatgacgagtataggttcgtttgtgtgttcgtgggttgtttttttatcggtggttcgtagtcgcg

SEQ ID NO: 89 - DNA, 17968 bp, Artificial Sequence
  chemically treated genomic DNA (Homo sapiens)
cgcgattacgagttatcggtgagagagtagtttacgggtatataggcggatttgtgttcgttattataagggttttatttttggggagatttattcgtatatcgttcgcgtacgttagaggttgggatttcgcgttgtttcgtcggcgatttgtttgaggttttttttttttggggtttttttttgttgttggatttttcgcgaatttcggttttcggagatcgttttggtaattgttttggttaggattggttttagtttagatttagacgtacgattatatagggtttttatttttttaagtgttagggatttattttcgggtaacggtggtttttattgtgatttaagcggcggttcgggtttcgcgtttgcgcgttggcgaggtcgatttttttcgttttatttttttttatttcgtagagttaggttgcggattttttaaaaaatggcggcgacgcggcggttgcggggtttggggcggcggtgttggaggttgcggcggcggcggcggcggcgtagttcgaggcgacgggtgggaagaggattgttagaggggtttgcgggagatttagggtcggatttataggagttttgtggtgaggatttttttgatcgtttttttgttttcgttttcgttgaaggaggagtttcggggtgtcggttgggttgcgcggattttttttggggttcgacgatggattttagcgggtgatcgggaatggggttttaatgtagtgaggcggaaagggtttcgtcggggtataggaagatttttagggtcgtaaggcgtgttgtcggttgtaaaggtatcgatttatgagtttattgttttttttttttttggtaggagtaggggtttgtttttatttttaaggttcgagggtttcggtatttcgaggcggttttcggcgatacgggtaaagagagatagaggcgagttcgagttggagttagtgtgtttatatgtggtattgtcgttttttaagagtatatgtaggtagcgtgtgtttttgaggtcgtagggggcgacgacgagacggatagtgatgtttaggcgtgcgttcggggggttattggagatttgttttataaagcggaggaaaagttaagcgtatttgaaaatttgcgagatagggtttgtgcgcgagtttacgttacgtttagggaggttcgttagaggagtcgagaggtttggataaagtatattttatttttagttcgtcgtcggttaggtatttttgacgtaattttttttgtatttagttaaaatttagtttcgttggttttttgatattcgtggtagttaaaagattcggtgttagaaggtattttttttaggagcggaggaagcggttggtttttaagaattagagaggaagtgtaggtgggatgtaatatcgttttttttagaaggttaatgttaggagcggtgggtttgttttcgtttttttttggatcgagcgtgtagttattatttgggttatggagatcgagagagtttttttgttttatataggtatggaagtttagagttttaggattattatagttgtttaattatttagaaagaggtgtggagagggaaataagtatgacgcggatcgttacgaggtttttttttgatggacggggaagttttttttgtggaagatattgagttatattaagaagtcgttaggttttttagagacggggtagatatagtaagagggaggttagagtagaggttagagtttaggtaggatacgggggggttatgttattattatcggtattcggggaggagtgttaaacgggtgattcggttaggaaggttagtttttgagagatagatatgtttgttttatttttttgtcggttttttttttcgtttttgcgtcgagttgtggttatatttttcgatgagggtagagggcgataggcgtgataattatttttttgaagttttgcgggtatttttttgcgggtggacgatgagcgtttgggaggtcgttgtttttggttggggagcgttcgtttggatttagtttagtaaagaggttgtttcggatggggaggggatgaaaatttttgcgggttcgacgtcgatgtttacgttgtttaggtttttatagatttttaaattggaatcgtcgggacgacgattgttaatcggttatacgatttaggtagagacgcggggagaggttgattagaagaaaggtcgacgtgtaagaaatttatttttcggcgtatagggtatatgtgtttcgaggcgtacgtatatatagacggatagagatagaaagagagggttacggaaagagcgagaagggagagagagagagagagagagatttgagagagagatagaagttcgtatatagataggtattgcgcgcgtatatatatagacgtattttttttaatatataaatatatatatttatgacgaatatatacgtatagtagggaatattttttcgtaggtagtttttgaagttgtcgggttttgtttttcgcgattgagagttagcggtgagagagtcgtttacgggtacgtaggcggatttgtgttcgttattataagggttttatttttggggagatttattcgtatatcgttcgcgtacgtttgaggttgggatttcgcgttgtttcgtcggcgatttgtttgaggttttttttttttggggtttttttttgttgttggatttttcgcgaatttcggttttcggagatcgttttggtaattgttttggttaggattggttttagtttagatttagacgtacgattatatagggtttttatttttttaagtgttagggatttattttcgggtaacggtggtttttattgtgatttaagcggcggttcgggtttcgcgtatgcgcgttggcgaggtcgattttttcgttttatttttttttatttcgtagagttaggttgcggattttttaaaaaatggcggcgacgcggcggttgcggggtttggggcggcggtgttggaggttgcggcggcggcggcgaaggcgtagttcgaggcggcgggtgggaagaggattgttagaggggtttgcgggagatttagggtcggatttataggagttttgtggtgaggatttttttgatcgtttttttgtttcggtttttattgaaggaggagtttcggggtgtcggttgggttgcgcggattttttttggggtgtttttttggggttcgatgatggattttagcgggtgatcgggaatggggttttaatgtagtgaggcggaaagggtttcgtcggggtataggaagatttttagggtcgtaaggcgtgttgtcggttgtaaaggtatcgatttatgagtttattgttttttttttttttggtaggagtaggggtttgtttttatttttaaggttcgagggtttcggtaattcgaggcggttttcggcgatacgggtaaagagagatagaggcgagttcgagttggagttagtgtgtttatatgtggtatcgtcgttttttaagagtatatgtaggtagcgtgtgtttttgaggtcgtagggggcgacgacgagacggatagtgatgtttaggcgtgcgttcggggggttattggagatttgttttataaagcggaggaaaagttaagcgtatttgaaaatttgcgagatagggtttgtgcgcgagtttacgttacgtttagggaggttcgttagaggagtcgagaggtttggataaagtatattttatttttagttcgtcgtcggttaggtatttttgacgtaattttttttgtatttagttaaaatttagtttcgttggttttttgatattcgtggtagttaaaagattcggtgttagaaggtattttttttaggagcggaggaagcggttggtttttaagaattagagaggaagtgtaggtgggatgtaatatcgttttttttagaaggttaatgttaggagcggtgggtttgttttcgtttttttttggatcgagcgtgtagttattatttgggttatggagatcgagagagtttttttgttttatataggtatggaagtttagagttttaggattattatagttgtttaattatttagaaagaggtgtggagagggaaataattatgacgcggatcgttacgaggtttttttttgatggacggggaagttttttttgtggaagatattgagttatattaagaagtcgttaggttttttagagacggggtagatatagtaagagggaggtgagagtagaggttagagtttaggtaggatacgggggggttatgttattattatcggtattcggggaggagtgttaaacgggtgattcggttaggaaggttagtttttgagagatagatatgtttgttttatttttttgtcggttttttttttcgtttttgcgtcgagttgtggttatatttttcgatgagggtagagggcgataggcgtgataattatttttttgaagttttgcgggtatttttttgcgggtggacgatgagcgtttgggaggtcgttgtttttggttggggagcgttcgtttggatttagtttagtaaagaggttgtttcggatggggaggggatgaaaatttttgcgggttcgacgtcgatgtttacgttgtttaggtttttatagatttttaaattggaatcgtcgggacgacgattgttaatcggttatacgatttaggtagagacgcggggagaggttgattagaagaaaggtcgacgtgtaagaaatttatttttcggcgtatagggtatatgtgtttcgaggcgtacgtatatatagacggatagagatagaaagagagggttacggaaagagcgagaagggagagagggagagggagagagagagagagagagagagagagagagagacgtgagagagagatagaagtcggtatatagataggtattgcgcgcgtatatatatagatatatatatagacgtatttttttaatatatatatatatatatttatgacgaatatatacgtatagtagggaatattttttcgtaggtagtttttgaagttgtcgggttttgtttttcgcgattgagagttatcggtgagagagtagtttacgggtacgtaggcggatttgtgttcgttattataagggttttatttttggggagatttattcgtatatcgttcgcgtacgtttgaggttgggatttcgcgttgtttcgtcggcgatttgtttgaggttttttttttttggggtttttttttgttgttggatttttcgcgaatttcggttttcggagatcgttttggtaattgttttggttaggattggttttagtttagatttagacgtacgattatatagggtttttatttttttaagtgttagggatttattttcgggtaacggtggtttttattgtgatttaagcggcggttcgggtttcgcgtatgcgcgttggcgaggtcgattttttcgttttatttttttttatttcgtagagttaggttgcggattttttaaaaaatggcggcgacgcggcggttgcggggtttggggcggcggtgttggaggttgcggcggcggcggcgaaggcgtagttcgaggcggcgggtggggagaggattgttagaggggtttgcgggagatttatggtcggatttataggagttttgtggtgaggatttttttgatcgtttttttgtttcggtttttattgaaggaggagtttcggggtgtcggttgggttgcgcggattttttttggggttcgatgatggattttagcgggtgatcgggaatggggttttaatgtagtgaggcggaaagggtttcgtcggggtataggaagatttttagggtcgtaaggcgtgttgtcggttgtaaaggtatcgatttatgagtttattgttttttttttttttggtaggagtaggggtttgtttttatttttaaggttcgagggtttcggtaattcgaggcggttttcggcgatacgggtaaagagagatagaggcgagttcgagttggagttagcgtgtttatatgtggtattgtcgttttttaagagtatatgtaggtagcgtgtgtttttgaggtcgtagggggcgacgacgagacggatagtgatgtttaggcgtgcgttcggggggttattggagatttgttttataaagcggaggaaaagttaagcgtatttgaaaatttgcgagatagggtttgtgcgcgagtttacgttacgtttagggaggttcgttagaggagtcgagaggtttggataaagtatattttatttttagttcgtcgtcggttaggtatttttgacgtaattttttttgtatttagttaaaatttagtttcgttggttttttgatattcgtggtagttaaaatattcggtgttagaaggtattttttttaggagcggaggaagcggttggtttttaagaattagagaggaagtgtaggtgggatgtaatatcgttttttttagaaggttaatgttaggagcggtgggtttgttttcgtttttttttggatcgagcgtgtagttattatttgggttatggagatcgagagagtttttttgttttatataggtatggaagtttagagttttaggattattatagttgtttaattatttagaaagaggtgtggagagggaaataagtatgacgcggatcgttacgaggtttttttttgatggacggggaagttttttttgtggaagatattgagttatattaagaagtcgttaggttttttagagacggggtagatatagtaagagggaggttagagtagaggttagagtttaggtaggatacgggggggttatgttattattatcggtattcggggaggagtgttaaacgggtgatttagttaggaaggttagtttttgagagatagatatgtttgttttatttttttgtcggttttttttttcgtttttgcgtcgagttgtggttatatttttcgatgagggtagagggcgataggcgtgataattatttttttgaagttttgcgggtatttttttgcgggtggacgatgagcgtttgggaggtcgttgtttttggttggggagcgttcgtttggatttagtttagtaaagaggttgtttcggatggggaggggatgaaaatttttgcgggttcgacgtcgatgtttacgttgtttaggtttttatagatttttaaattggaatcgtcgggacgacgattgttaatcggttatacgatttaggtagagacgcggggagaggttgattagaagaaaggtcgacgtgtaagaaatttatttttcggcgtatagggtatatgtgtttcgaggcgtacgtatatatagacggatagagatagaaagagagggttacggaaagagcgagaagggagatagagagagagagagagagagagagagagagagagagagagagagagagacgtgagagagagatagaagtcggtatatagataggtattgcgcgcgtatatatatagatatatatatagacgtattttttttaatatatatatatatatatttatgacgaatatatacgtatagtagggaatattttttcgtaggtagtttttgaagttgtcgggttttgtttttcgcgattgagagttatcggtgagagagtagtttacgggtacgtaggcggatttgtgttcgttattataagggttttatttttggggagatttattcgtatatcgttcgcgtacgtttgaggttgggatttcgcgttgtttcgtcggcgatttgtttgaggttttttttttttggggtttttttttgttgttggatttttcgcgaatttcggttttcggagatcgttttggtaattgttttggttaggattggttttagtttagatttagacgtacgattatatagggtttttatttttttaagtgttagggatttattttcgggtaacggtggtttttattgtgatttaagcggcggttcgggtttcgcgtatgcgcgttggcgaggtcgattttttcgttttatttttcgttatttcgtagagttaggttgcggattttttaaaaaatggcggcgacgcggcggttgcggggtttggggcggcggtgttggaggttgcggcggcggcggcgaaggcgtagttcgaggcggcgggtgggaagaggattgttagaggggtttgcgggagatttagggtcggatttataggagttttgtggtgaggatttttttgatcgtttttttgtttcggtttttattgaaggaggagtttcggggtgtcggttgggttgcgcggattttttttggggttcgatgatggattttagcgggtgatcgggaatggggttttaatgtagtgaggcggaaagggtttcgtcggggtataggaagatttttagggtcgtaaggcgtgttgtcggttgtaaaggtatcgatttatgagtttattgttttttttttttttggtaggagtaggggtttgtttttatttttaaggttcgagggtttcggtaattcgaggcggttttcggcgatacgggtaaagagagatagaggcgagttcgagttggagttagtgtgtttatatgtggtattgtcgttttttaagagtatatgtaggtagcgtgtgtttttgaggtcgtagggggcgacgacgagacggatagtgatgtttaggcgtgcgttcggggggttattggagatttgttttataaagcggaggaaaagttaagcgtatttgaaaatttgcgagatagggtttgtgcgcgagtttacgttacgtttagggaggttcgttagaggagttaagaggtttggataaagtatattttatttttagttcgtcgtcggttaggtatttttgacgtaattttttttgtatttagttaaaatttagtttcgttggttttttgatattcgtggtagttaaaagattcggtgttagaaggtattttttttaggagcggaggaagcggttggtttttaagaattagagaggaagtgtatgtgggatgtaatatcgttttttttagaaggttaatgttaggagcggtgggtttgttttcgtttttttttggatcgagcgtgtagttattatttgggttatggagatttagagagtttttttgttttatataggtatggaagtttagagttttaggattattatagttgtttaattatttagaaagaggtgtggagagggaaataattatgacgcggatcgttacgaggtttttttttgatggacggggaagttttttttgtggaagatattgagttatattaagaagtcgttaggttttttagaggcggggtagatatagtaagagggaggttagagtagaggttagagtttaggtaggatacgggggggttatgttattattatcggtattcggggaggagtgttaaacgggtgattcggttaggaaggttagtttttgagagatagatatgtttgttttatttttttgtcggttttttttttcgtttttgcgtcgagttgtggttatatttttcgatgagggtagagggcgataggcgtgataattatttttttgaagttttgcgggtatttttttgcgggtggacgatgagcgtttgggaggtcgttgtttttggttggggagcgttcgtttggatttagtttagtaaagaggttgtttcggatggggaggggatgaaaatttttgcgggttcgacgtcgatgtttacgttgtttaggtttttatagatttttaaattggaatcgtcgggacgacgattgttaatcggttatacgatttaggtagagacgcggggagaggttgattagaagaaaggtcgacgtgtaagaaatttatttttcggcgtatagggtatatgtgtttcgaggcgtacgtatatatagacggatagagatagaaagagagggttacggaaagagcgagaagggagatagagagagagagagagagagagagagagagagagagagacgtgagagagagatagaagtcggtatatagataggtattgcgcgcgtatatatatagatatatatatagacgtattttttttaatatatatatatatatatttatgacgaatatatacgtatagtagggaatattttttcgtaggtagtttttgaagttgtcgggttttgtttttcgcgattgagagttatcggtgagagagtagtttacgggtacgtaggcggatttgtgttcgttattataagggttttatttttggggagatttattcgtatatcgttcgcgtacgtttgaggttgggatttcgcgttgtttcgtcggcgatttgtttgaggttttttttttttggggtttttttttgttgttggatttttcgcgaatttcggttttcggagatcgttttggtaattgttttggttaggattggttttagtttagatttagacgtacgattatatagggtttttatttttttaagtgttagggatttattttcgggtaacggtggtttttattgtgatttaagcggcggttcgggtttcgcgtatgcgcgttggcgaggtcgattttttcgttttatttttttttatttcgtagagttaggttgcggattttttaaaaaatggcggcgacgcggcggttgcggggtttggggcggcggtgttggaggttgcggcggcggcggcgaaggcgtagttcgaggcggcgggtgggaagaggattgttagaggggtttgcgggagatttatggtcggatttatgagttttgtggtgaggatttttttgatcgtttttttgtttcggtttttattgaaggaggagtttcggggtgtcggttgggttgcgcggattttttttggggttcgatgatggattttagcgtgtgatcgggaatggggttttaatgtagtgaggcggaaagggtttcgtcggggtataggaagatttttagggtcgtaaggcgtgttgtcggttgtaaaggtatcgatttatgagtttattgttttttttttttttggtaggagtaggggtttgtttttatttttaaggttcgagggtttcggtaattcgaggcggttttcggcgatacgggtaaagagagatagaggcgagttcgagttggagttagtgtgtttatatgtggtattgtcgttttttaagagtatatgtaggtagcgtgtgtttttgaggtcgtagggggcgacgacgagacggatagtgatgtttaggcgtgcgttcggggggttattggagatttgttttataaagcggaggaaaagttaagcgtatttgaaaatttgcgagataggggtttgtgcgcgagtttacgttacgtttagggaggttcgttagaggagtcgagaggtttggataaagtatattttatttttagttcgtcgtcggttaggtatttttgacgtaattttttttgtatttagttaaaatttagtttcgttggttttttgatattcgtggtagttaaaatattcggtgttagaaggtattttttttaggagcggaggaagcggttggtttttaagaattagagaggaagtgtaggtgggatgtaatatcgttttttttagaaggttaatgttaggagcggtgggtttgttttcgtttttttttggatcgagcgtgtagttattatttgggttatggagatcgagagagtttttttgttttatataggtatggaagtttagagttttaggattattatagttgtttaattatttagaaagaggtgtggagagggaaataattatgacgcggatcgttacgaggtttttttttgatggacggggaagttttttttgtggaagatattgagttatattaagaagtcgttaggttttttagaggcggggtagatatagtaagagggaggttagagtagaggttagagtttaggtaggatacgggggggttatgttattattatcggtattcggggaggagtgttaaacgggtgattcggttaggaaggttagtttttgagagatagatatgtttgttttatttttttgtcggttttttttttcgtttttgcgtcgagttgtggttatatttttcgatgagggtagagggcgataggcgtgataattatttttttgaagttttgcgggtatttttttgcgggtggacgatgagcgtttgggaggtcgttgtttttggttggggagcgttcgtttggatttagtttagtaaagaggttgtttcggatggggaggggatgaaaatttttgcgggttcgacgtcgatgtttacgttgtttaggtttttatagatttttaaattggaatcgtcgggacgacgattgttaatcggttatacgatttaggtagagacgcggggagaggttgattagaagaaaggtcgacgtgtaagaaatttatttttcggcgtatagggtatatgtgtttcgaggcgtacgtatatatagacggatagagatagaaagagagggttacggaaagagcgagaagggagatagagagagagagagcgagagagagagagagagagagagagagagagagagagagagagacgtgagagagagatagaagtcggtatatagataggtattgcgcgcgtatatatatagatatatatatagacgtattttttttaatatatatatatatatatttatgacgaatatatacgtatagtagggaatattttttcgtaggtagtttttgaagttgtcgggttttgtttttcgcgattgagagttatcggtgagagagtagtttacgggtacgtaggcggatttgtgttcgttattataagggttttatttttggggagatttattcgtatatcgttcgcgtacgtttgaggttgggatttcgcgttgtttcgtcggcgatttgtttgaggttttttttttttggggtttttttttgttgttggatttttcgcgaatttcggttttcggagatcgttttggtaattgttttggttaggattggttttagtttagatttagacgtacgattatatagggtttttatttttttaagtgttagggatttattttcgggtaacggtggtttttattgtgatttaagcggcggttcgggtttcgcgtatgcgcgttggcgaggtcgattttttcgttttatttttttttatttcgtagagttaggttgcggattttttaaaaaatggcggcgacgcggcggttgcggggtttggggcggcggtgttggaggttgcggcggcggcggcgaaggcgtagttcgaggcggcgggtggggagaggattgttagaggggtttgcgggagatttatggtcggatttataggagttttgtggtgaggatttttttgatcgtttttttgtttcggtttttattgaaggaggagtttcggggtgtcggttgggttgcgcggattttttttggggttcgatgatggattttagcgggtgatcgggaatggggttttaatgtagtgaggcggaaagggtttcgtcggggtataggaagatttttagggtcgtaaggcgtgttgtcggttgtaaaggtatcgatttatgagtttattgttttttttttttttggtaggagtaggggtttgtttttatttttaaggttcgagggtttcggtaattcgaggcggttttcggcgatacgggtaaagagagatagaggcgagttcgagttggagttagtgtgtttatatgtggtattgtcgttttttaagagtatatgtaggtagcgtgtgtttttgaggtcgtagggggcgacgacgagacggatagtgatgtttaggcgtgcgttcggggggttattggagatttgttttataaagcggaggaaaagttaagcgtatttgaaaatttgcgagatagggtttgtgcgcgagtttacgttacgtttagggaggttcgttagaggagtcgagaggtttggataaagtatattttatttttagttcgtcgtcggttaggtatttttgacgtaattttttttgtatttagttaaaatttagtttcgttggtttttgatattcgtggtagttaaaagattcggtgttagaaggtattttttttaggagcggaggaagcggttggtttttaagaattagagaggaagtgtaggtgggatgtaatatcgttttttttagaaggttaatgttaggagcggtgggtttgttttcgtttttttttggatcgagcgtgtagttattatttgggttatggagatcgagagagtttttttgttttatataggtatggaagtttagagttttaggattattatagttgtttaattatttagaaagaggtgtggagagggaaataattatgacgcggatcgttacgaggtttttttttgatggacggggaagttttttttgtggaagatattgagttatattaagaagtcgttaggttttttagagacggggtagatatagtaagagggaggttagagtagaggttagagtttaggtaggatacgggggggttatgttattattatcggtattcggggaggagtgttaaacgggtgattcggttaggaaggttagtttttgagagatagatatgtttgttttatttttttgtcggttttttttttcgtttttgcgtcgagttgtggttatatttttcgatgagggtagagggcgataggcgtgataattatttttttgaagttttgcgggtatttttttgcgggtggacgatgagcgtttgggaggtcgttgtttttggttggggagcgttcgtttggatttagtttagtaaagaggttgtttcggatggggaggggatgaaaatttttgcgggttcgacgtcgatgtttacgttgtttaggtttttatagatttttaaattggaatcgtcgggacgacgattgttaatcggttatacgatttaggtagagacgcggggagaggttgattagaagaaaggtcgacgtgtaagaaatttatttttcggcgtatagggtatatgtgtttcgaggcgtacgtatatatagacggatagagatagaaagagagggttacggaaagagcgagaagggagatagagagagagagagagagagagagagagagagagagacgtgagagagagatagaagtcggtatatagataggtattgcgcgcgtatatatatagatatatatatagacgtattttttttaatatatatatatatatatttatgacgaatatatacgtatagtagggaatattttttcgtaggtagtttttgaagttgtcgggttttgtttttcgcgattgagagttatcggtgagagagtagtttacgggtacgtaggcggatttgtgttcgttattataagggttttatttttggggagatttattcgtatatcgttcgcgtacgtttgaggttgggatttcgcgttgtttcgtcggcgatttgtttgaggttttttttttttggggtttttttttgttgttggatttttcgcgaatttcggttttcggagatcgttttggtaattgttttggttaggattggttttagtttagatttagacgtacgattatatagggtttttatttttttaagtgttagggatttattttcgggtaacggtggtttttattgtgatttaagcggcggttcgggtttcgcgtatgcgcgttggcgaggtcgattttttcgttttatttttttttatttcgtagagttaggttgcggattttttaaaaaatggcggcgacgcggcggttgcggggtttggggcggcggtgttggaggttgcggcggcggcggcgaaggcgtagttcgaggcggcgggtggggagaggattgttagaggggtttgcgggagatttatggtcggatttataggagttttgtggtgaggatttttttgatcgtttttttgtttcggtttttattgaaggaggagtttcggggtgtcggttgggttgcgcggattttttttggggttcgatgatggattttagcgggtgatcgggaatggggttttaatgtagtgaggcggaaagggtttcgtcggggtataggaagatttttagggtcgtaaggcgtgttgtcggttgtaaaggtatcgatttatgagtttattgttttttttttttttggtaggagtaggggtttgtttttatttttaaggttcgagggtttcggtaattcgaggcggttttcggcgatacgggtaaagagagatagaggcgagttcgagttggagttagtgtgtttatatgtggtattgtcgttttttaagagtatatgtaggtagcgtgtgtttttgaggtcgtagggggcgacgacgagacggatagtgatgtttaggcgtgcgttcggggggttattggagatttgttttataaagcggaggaaaagttaagcgtatttgaaaatttgcgagatagggtttgtgcgcgagtttacgttacgtttagggaggttcgttagaggagtcgagaggtttggataaagtatattttatttttagttcgtcgtcggttaggtatttttgacgtaattttttttgtatttagttaaaatttagtttcgttggttttttgatattcgtggtagttaaaagattcggtgttagaaggtattttttttaggagcggaggaagcggttggtttttaagaattagagaggaagtgtaggtgggatgtaatatcgttttttttagaaggttaatgttaggagcggtgggtttgttttcgtttttttttggatcgagcgtgtagttattatttgggttatggagatcgagagagtttttttgttttatataggtatggaagtttagagttttaggattattatagttgtttaattatttagaaagaggtgtggagagggaaataattatgacgcggatcgttacgaggtttttttttgatggacggggaagttttttttgtggaagatattgagttatattaagaagtcgttaggttttttagagacggggtagatatagtaagagggaggttagagtagaggttagagtttaggtaggatacgggggggttatgttattattatcggtattcggggaggagtgttaaacgggtgattcggttaggaaggttagtttttgagagatagatatgtttgttttatttttttgtcggttttttttttcgtttttgcgtcgagttgtggttatatttttcgatgagggtagagggcgataggcgtgataattatttttttgaagttttgcgggtatttttttgcgggtggacgatgagcgtttgggaggtcgttgtttttggttggggagcgttcgtttggatttagtttagtaaagaggttgtttcggatggggaggggatgaaaatttttgcgggttcgacgtcgatgtttacgttgtttaggtttttatagatttttaaattggaatcgtcgggacgacgattgttaatcggttatacgatttaggtagagacgcggggagaggttgattagaagaaaggtcgacgtgtaagaaatttatttttcggcgtatagggtatatgtgtttcgaggcgtacgtatatatagacggatagagatagaaagagagggttacggaaagagcgagaagggagatagagagagagagagagagagagagagagagacgtgagagagagatagaagtcggtatatagataggtattgcgcgtgtatatatatagatatatatatagacgtatttttttaatatatatatatatatatttatgacgaatatatacgtatagtagggaatattttttcgtaggtagtttttgaagttgtcgggttttgtttttcgcgattgagagttatcggtgagagagtagtttacgggtacgtaggcggatttgtgttcgttattataagggttttatttttggggagatttatttcgtatatcgttcgcgtacgtttgaggttggatttcgcgttgtttcgtcggcgatttgtttgaggttttttttttttggggtttttttttgttgttggatttttcgcgaatttcggttttcggagatt

SEQ ID NO: 90 - DNA, 2730 bp, Artificial Sequence
  chemically treated genomic DNA (Homo sapiens)
gtttttattcgcgcgtttacgtgcgtggataaacgcgggaattcggtagtttttaacgttattttgtagagattttcgggttgtgagagagttggggtgtgcggcgggggaggggagggtttgatatttttaggttgagagttaagttttgggggagcggtatgggcgggggtggtcggggggaggcggaggatggagcgcgaattagaaagcgtagaggattttcggttcgcgtcgtattcgttgtgattagttttagaggcgcgattcgggagggcggatttttttttaatttttattgtttttttttttttttttttttttaaaagacgttttgcgggtagagttgttagtaatttcgcggtcgtttgtatttggtcgcggcggagttgatttttgtttttgtgatagataggggttggggttgagcggtcgtttgtttggggtattcgtacgtggggaataaatttttttttttcggtttttttcgggattcggcgatcgttataggttgggattttgtgcggcgttggagttggtagtttcgggcgttatggtttttttgaggagtggggagggaggtggtcggggggttggcgcgtttttcgcgcggggagcgttatgagtcgggcgaagggcggtagcgatagttttagtaattgtttttgtcggcgtttttcgtaggttttcgttaattcgtttcgcgtattatgttgattttcggtttgcggaattcgtagtgtagtttttgtcgttttttcggtttttgttattttacgtaggattggtttcggtcgtcggggttagtagtttgcgacgtgtttttggggaggcggaatcgttgtgcgttttgagttcgggtttagtttttcgttttttagttgcgttttgttttcggtcgtttagggagtttagtggcgatgagggtattgttggcgttttgttttttttttggttggttgcgttggggttcggcgggcgtttagtagttcggagagtattgttacggttgggtggacgtgtagggtaattattacgagggtttttagtgtttagaggatttcgatacgttggacgttattatttgttgcggtttttgcgcgtttcgttattgttgcgtcgcggtcgacgttaggttggagtagggcggttgtattaacgatcgtcgcgaattggagtatttaggtattattgcgcgtaagtgcggggttttcggggatatattttcgttcgtttaacggcggcggttgtatgtgtgcgcgggaggatgtatagatttaggtaggtttatgcgtttttttgggtttgtgcgttagggggacgcggtcgggtgggggaattaagggatgagtgggtggtcgcgttttagattatggttttttatttatttgtagtttcgtttttcgttatttgcggtttttgcgggtcggttcgtagggaaagtttgttagggatagtgaggagcgcggggtttgtgtttggtagtcggggggaagatagttggagttttcgggagaagggtagtgcgggtaaagttagggtagatttgggttttggtggaggggtcgagggtgttttattgttcgtttttgttatttcgggagtttcgggaagtgtcgaatgtagggaatcgcgatttttgtcgcgcgtttatttgtagttttttagggttaagaaattttagttattttttttttttgttttaatgatagcgtttttaagttacggtttcgttttgtagatttttttttaattttttgtatcgaattatttttttcggtttattttttattgttacgttttttagaaatgtttaggttttcgaggtggagatttagaaataagggtcgaaggggttttttcgttttttatttttatttcggaaaatacgggttaaattttcgttgattttagagcggaataaattacgattttagtagagaaaatttatattttgaaaaaaagttttttatttgaatcggaatattagggaaacgttttagagtttgaggcgagggttttatggttagggaaatcggagaagcgggcggagttgagagcgggtgatattttaggattttagagagtcgaggtttggagttcgtaagagaaggtcgtcgggaaagggaagagaggttggagagattattaagggttttttaacggttttttttcgtaaattgataatttagaggataggggagtttgttttttattagtgttttattagagggtgaatgttgggggttaatatttttaatttagaggattttggaagtagttttggagaaaagatgtttagcggaaagtagggaaatttaggtttttttggtttgttagaaaaatatagatttttttttacggttttattcgtttattttgggggatttagttgttttttgggagtaagtgtaattgtttagtttgtagtacgggttttttttgcgttttttattcggttcggatgttagaggatagtagaagggagaggtagtttttatatttattgagtttgggattaggtaaattttgatggattttggttttgttatttgtcggcggtgtaatttgggtaagttatttaattgttttggatatttttttttagttttaaagtgggtatattgtttttaaaggagttaagttgttggtgacgtgagagtgtatgaatgttggagcgtagggtttagtaaatggtagttatttatttttgttttgttttgtacgttg

SEQ ID NO: 91 - DNA, 2730 bp, Artificial Sequence
  chemically treated genomic DNA (Homo sapiens)
tagcgtgtaaggtaaggtaaaggtaagtaattattatttattgagttttgcgttttagtatttatatatttttacgttattaataatttaatttttttgagagtaatatgtttattttagaattgagaagaggtatttagagtagttaagtaatttgtttaagttatatcgtcggtaagtgatagagttaaggtttattagggtttgtttgattttagatttagtgagtgtggagattgttttttttttttgttgttttttggtattcgagtcgagtagggagcgtagaggaagttcgtgttgtagattgggtaattgtatttatttttagagggtagttgggttttttagggtgagcgagtgaagtcgtggggaagagtttatatttttttaataggttaggagggtttagatttttttatttttcgttgagtattttttttttagaattatttttagaattttttagattggaaatgttgatttttaatatttattttttagtggagtattaatggagggtagatttttttgttttttgggttattagtttgcggggaggggtcgttggggaatttttaatgatttttttagttttttttttttttttcggcgatttttttttgcgggttttagatttcggttttttggagttttggggtgttattcgtttttagtttcgttcgttttttcggtttttttggttataaaattttcgttttaagttttaaagcgtttttttgatgtttcgatttaggtggaaaatttttttttaaggtgtaaattttttttgttggggtcgtgatttatttcgttttgaagttagcggaaatttgattcgtgtttttcgaagtgagaatagggggcggggaagttttttcgatttttgtttttaaatttttatttcgaagatttgggtatttttgaaaggcgtgataatagggggtgggtcggagagggtaattcgatgtagagaattgaaaggaagtttgtagaacggggtcgtggtttagaaacgttattattaagatagaaaaaaaaagtgattggggttttttagttttgaagggttgtaaatgagcgcgcgataagagtcgcgattttttgtattcggtatttttcgaagttttcgaagtgataagggcgagtaatgggatattttcggtttttttattaaaatttaagtttattttggttttattcgtattatttttttttcgggagttttagttgtttttttttcggttattaggtataagtttcgcgttttttattgtttttggtaaattttttttgcgggtcgattcgtagagatcgtaagtggcgggaagcgggattgtaaatgaatagaggattatgatttgaaacgcgattatttatttattttttgatttttttattcggtcgcgtttttttggcgtatagatttaggaaggcgtatagatttgtttgggtttgtgtattttttcgcgtatatatgtagtcgtcgtcgttaggcgggcggggatatgttttcgagggtttcgtatttacgcgtagtgatgtttgggtgttttagttcgcggcggtcgttggtgtagtcgttttgttttagtttggcgtcggtcgcggcgtaatagtagcggagcgcgtaggagtcgtagtagatggtagcgtttagcgtgtcgaagttttttgggtattggaagttttcgtggtagttgttttgtacgtttatttagtcgtggtagtatttttcggattgttgggcgttcgtcgggttttagcgtagttagttaaggagaaggtaaagcgttagtagtgtttttatcgttattgggttttttgggcggtcgggagtaggacgtagttggaaagcgaagggttgagttcgggtttagggcgtatagcgatttcgtttttttagggatacgtcgtaagttgttggtttcggcggtcgaagttagttttgcgtgggatagtaggggtcggggaggcgataggggttgtattacgagtttcgtaggtcgggagttagtatggtgcgcggggcgagttggcgagggtttgcgggaggcgtcggtagaggtagttgttggggttgtcgttgtcgtttttcgttcggtttatagcgtttttcgcgcgaggggcgcgttaatttttcggttatttttttttttattttttaagggagttatagcgttcggggttgttaattttagcgtcgtatagagttttaatttgtggcgatcgtcgggtttcgagaggagtcggaggaaaagaatttgttttttacgtgcgagtattttagataggcggtcgtttagttttagtttttatttgttataggagtaggagttagtttcgtcgcggttaagtataaacggtcgcggggttgttgatagttttgttcgtaaggcgttttttaaaaaggaagagggaggaggagataatgagggttaagaaagagttcgttttttcggatcgcgtttttggagttaattatagcgggtgcggcgcgggtcgagggttttttgcgttttttggttcgcgttttatttttcgttttttttcggttattttcgtttatgtcgtttttttaggatttgatttttaatttgaagatattagatttttttttttttcgtcgtatattttaatttttttatagttcggaaatttttgtagagtgacgttgagggttgtcgaattttcgcgtttatttacgtacgtgggcgcgcgagtggagat

SEQ ID NO: 92 - DNA, 2396 bp, Artificial Sequence
  chemically treated genomic DNA (Homo sapiens)
atttattattttaattattttaggtgtatagattataagtattaattatatttatattgttgtgtaatagatttgtagaaattatttattttgtaaaattgtagttattgaataatagttttttatttttttgttttttgtggtggttttaaatataatgtaatatatattagttgaaaatggaaaaaagaagtatatgaaaatgttaaatgtatagtataaaaaatgaataatagggttattttggttataattttaaatgagaaaatttaaagtaaaataataatttatgatatattatataaaatgtataatttaaaatttttaaaatttaatattaataaaaatatatgtaatatattatataagtatttaataaaattgaatataattatgtttaatttttttaaattgtgaaaaagattttattaatttttgaatatttacgtaaggaaattaagtatatttttttttgaaaaagtttgattttaattttttttttttttttttttttttgagatagagttttgttttattatttaggttggagtatagtggcgtgatattagtttattgtaagtttcgtttttcgggtttacgttatttttttgttttagtttttcgagtagttgggattataggcgttcgttattgtgtttagttaatttttttttgtatttttagtagagacggggttttatcgtggttttgattttttgatttcgtgatttgttcgtttcggttttttaaagtgttaggattataggcgtgagttattacgtttagttagtttgattttaattttaatagataggtgtttttgataattagtttatttttttattgaaattttttttttttttttttaaaaaattttaaatttttaattttcgtttttatttattttttttttgtttttaaaaggaaaggagtgcgtagttttgttgtttgtatatcgtttatagtttttggttcggggtagggttttttaggtcgttcgggggtttatatgtagtttttggggggtcggcgcggggtgaggttcggtcggttggggtcgtcgttaggcgcgttggttgggtagtttttgggagatgaagcgacgtaggcgttttaggtattggttgtagagttcgatgtcgttgtgttcggcgttttttatttatagcggttttatcgttttggggtagcgttcgtagagcgttagttcgtgtgagaagtcgattatttcgttttttatgtcgtggatgatgagtacgggcgacgtgattttggatattttttcgatgttagggaaggcgtcgaagtagtaggttttggtgtcggggaaggcgacgcgtatgttcgaggtgagcggcgagtgtagtattatcgcggtatattcgtagcgcgaggttaggtttacggtgggtatcgtgtcgatgttttgttcgtataggatgatgttgttcgggttgatgtcgtatttggcggcgtcggagtagggttagtcgcggttttcgaggcgcgcgtattttttttattagcgggcgttttcgggtttagtttcggatgcgattttttagtttttttatttagttaagttagtgggttaggtttaggttttatattagtttcgagggttatttttagtttttaatatcgcggcggtgggcgaggttagcggtttcgtttcgttttttggcgttgtcgtttattggcgttttttagtaaggatttgtagggatttcgtttacggagtgtttttggggtaggggtaggggaggttttggcgtttgttttttttttggttatttttaggtgtatattgggaattgtgtgttttttatattttgaatgttttaggtttttttgttcgggttagaaagtcgtttttggtgtattggttaggatagcggatattttttttttttgtagtttttgtttatttttttggttatgaggaatttaggtagttgtgtttttagatgtttttatttaattttggattttcggagtttttacgtttaatgagatgttagtgtaatttaggttagtatcgaaggtggtggttgcggaggtggtatttttttttattagtatttttttttgggagtggataagttttcggttattttagtattattagtttttatttagggttatttttatttttaggttattggtgtgcggtttttgatttagttgatttagtattagttataaggttttttcgtatttagttttaattacgcgggatttatttgttattttgtttatgttaggattttataattttttttttatacgttttaggttttgattttaggtagatatttttttgtaaggtaggagtatgggtaggtgtgcgttttttttgtttggtattcggattttattagtagggttgttttcgt

SEQ ID NO: 93 - DNA, 2396 bp, Artificial Sequence
  chemically treated genomic DNA (Homo sapiens)
acggggatagttttgttggtggagttcgaatgttaggtagaggggacgtatatttgtttatgtttttgttttgtaagagggtgtttgtttgggattagagtttggagcgtgtgggaggagagttgtggggttttggtatgggtagggtggtaggtgggtttcgcgtggttgggattgggtacgaggaggttttgtaattggtgttggattagttgggttaagggtcgtatattaatgatttgggggtgggggtggttttgggtgggagttggtggtgttgaggtggtcgaggatttgtttatttttaagggaaggtgttggtgggagggggtgttattttcgtagttattattttcgatgttgatttgggttgtattggtattttattgggcgtggggatttcgagagtttaaaattgggtggagatatttggggatatagttgtttgaattttttatggttaagggggtgggtaagggttgtaggaaggaagagtgttcgttgttttggttagtgtattaggaacggttttttaattcgggtagggaggtttgaagtatttaggatgtggggggtatatagtttttagtgtgtatttaggggtgattaggaggagaataggcgttagggttttttttatttttgttttaggggtatttcgtaggcgggatttttgtagatttttgttaggaaacgttagtgaacggtagcgttagggaacggggcggggtcgttggtttcgtttatcgtcgcggtgttgggggttgggggtggttttcgggattggtgtggagtttgggtttgatttattgatttggttgagtggggagattagagggtcgtattcggagttgggttcggggacgttcgttggtgggaagggtgcgcgcgtttcggaggtcgcggttgattttgtttcggcgtcgttaggtacggtattagttcggatagtattattttgtacgggtagagtatcggtacggtgtttatcgtggatttggtttcgcgttacgagtgtgtcgcggtggtgttgtattcgtcgtttatttcgggtatgcgcgtcgtttttttcgatattaagatttattgtttcgacgttttttttaatatcgagaaggtgtttaagattacgtcgttcgtgtttattatttacggtatagaggacgaggtgatcgattttttatacgggttggcgttttacgagcgttgttttaaggcggtggagtcgttgtgggtggagggcgtcggatataacgatatcgagttttatagttagtatttggagcgtttgcgtcgttttattttttaggagttgtttagttagcgcgtttagcggcggttttaatcggtcggattttatttcgcgtcggttttttaggggttgtatgtggattttcgggcggtttaggggattttgtttcgagttaggggttgtggacgatgtataggtaatagagttacgtatttttttttttttggaagtaagaagaaaataagtgaaaacggaaattaaagatttaaaattttttaaaaaaagaaaaagaaaattttagtaagaaaataaattggttgttaaaaatatttgtttgttaaaattggaattaaattggttgggcgtggtggtttacgtttgtaattttggtattttgggaggtcgaggcgggtagattacgaggttaagagattaagattacggtgaaatttcgtttttattaaaaatataaaagaaaattagttgggtatagtggcgggcgtttatagttttagttattcgggaggttgaggtaggagaatggcgtgaattcgggaggcggagtttgtagtgagttgatattacgttattgtattttagtttgggtgatagagtaagattttgttttaaaaaaaaaaaaagaaaaaaaaaattggaattaaatttttttaagaagagatgtatttggtttttttgcgtaaatatttaaaagttaataggattttttttatagtttaaaaaaattaaatataattgtatttagttttattgaatatttatgtggtgtattatatatatttttgttaatattaaattttaaaaattttaaattgtgtattttatatgatatattatagattgttgttttattttgagtttttttatttaaagttataattaaagtgattttattatttattttttgtgttatgtatttaatatttttatatattttttttttttatttttagttagtatgtattgtattgtatttaaaattattataagaggtaggaaaatggggagttgttatttaatagttatagttttgtaagatggataatttttgtagatttgttgtatagtaatgtgaatatagttaatatttatgatttgtatatttaaaatgattaagatggtaaat

SEQ ID NO: 94 - DNA, 3190 bp, Artificial Sequence; identical to SEQ ID NO: 72
  chemically treated genomic DNA (Homo sapiens)

SEQ ID NO: 95 - DNA, 3190 bp, Artificial Sequence; identical to SEQ ID NO: 73
  chemically treated genomic DNA (Homo sapiens)

SEQ ID NO: 96 - DNA, 2478 bp, Artificial Sequence
  chemically treated genomic DNA (Homo sapiens)
ttatgagatttaatttggttgttttttttgttgagtgagttattaaaggttttttgtggggtggaggggcgtgagggagtagattatagattttatgttagtattaattttatatttatttgttgttgggtttttttttgagtttaaaatgagttagaatttagggttttagttttggattatgtaatttgttgtttttttttaagttatgtttgatttggtttaaaagtaattttttttttatttgtatttttaattttaaggaagtgggagagttagagtaagttaagtaaattgcggttttagtaatttgtttttcgatttttaaagtttaagggaaggtatgttgagagagtttgttaatttcgtttcgatataagaaaaatgataaaattagttattgatatttttttgattgtatttattttagatttgggaaagaatatttggtttgttataaatataataggagttatatattttttatttttattttttttttttaaagtaagatgattttgtaaatatttttatgaaggattcgtttataaaaaaataaaaattagttttagttgttggtgtattattaagttgttgattaggtatgaaataagtgtaataggtaatagttaatttaatagtttttttttgatttttatatattgagtaaaagttatataggttaaatggaagtttagtgattagttttagatttgaaataaaatttaaattttgtttgtgagaagttttatttgagttaagtttattttttgttgggatatattgttatttgtaatgattttagtttttagtattattttttatttaaatttttttttataaaattgatttaggtaatcgatttaaaggtaagttagtttttatagaaagatagatatttaaaaaaatgatttagataaataaattatatttttatagttaggaatttagagtcgaattaatttaattagatgtaaaattaatgagaatttcgagattttcgacgttttattttagaatttttatttaggtgcggtcgggagttatagtttttgaatattttttcggaattttttttttatttgatttttaagtttgttatggggtttttttttaatggtattgatttgtaattatttaacgagtagcgggatagtttcgggtaggacgtattttgggtgggtgacgtgatttcgtagtttttttttcgattttatattttatataatgattttcgtttatagaagttaagggggaaagatgacgtttttaaagttcgaatttttttattttggagttagaattagcgtcgtcgtcgttttttgtagtttagtcggtaacgcgcgtcgagtttcggggcgtagtttggagacgcgtttgttcgttttgggaaggggtacgggacgtacggtttttcggttttagttgtatagtttagttcggggtttttatttattttcgtttagagttatattcggttgttttttttgattattcgatataaagagattcgtcggtggaaagaatcgattttaaaatttaagtttatcgttgtttaataaggcgcgtacgttttttttcgtttggttttatatgttttaaatttttagtaatagaaatgaggaagtagtagtttttttcggttgttggcggaggtagtgggtgtaatttgtgaagtttcgtgttatgatgaatttggttatttgggtgtgttggagagggttggtcgtttttttttttttttttttattattatttttttttttttcgtttttttttttaatttaatttttttttttggtattcgtcggttgttatttagaattttagtattttttttattatatttttgggggtaatgtatttcgaaaaggttttaattattttacggatgaatttggttattttgtataaagcgtgagtgtttgttaaataattttttatagtacgtggtaaaaaagtagcgttttttaaaagatataaaaggttagtaatgttatataagcgttttttattagttttttaaggatagaaacgtgggtagtttatttagtggagatttaatttttaaatatttattgaaaaggagtgaagggtagaaaaatagaaattaaatttttagttggttgtttttttttttatatgtattagaaagtatttttaatatataatatatatttgaaaagaatataatgaatatttacgtgtttattatgtagtataaaaaaattaaaattatttatatagtggaaattatttgttaatttttttttcgttgaaatatatttttttttttttttttttggaaagaaaattgttttaaatttgattttttatgagtaatttttatattagtttttaaaaatgtgaaagggaatatgttaatttaaagtttattagaaagttatgtaatgaatatttttttgttgtgtttgattttggtttttaaatagaagtttttttaaataaaattttaaa

SEQ ID NO: 97 - DNA, 2478 bp, Artificial Sequence
  chemically treated genomic DNA (Homo sapiens)
tttaaagttttatttaaagaaatttttgtttggaaattaaggttaagtatagtagagggatgtttattgtatggttttttggtaaattttaagttagtatgtttttttttatatttttagaaattgatataaaaattgtttatgggaaattaaatttggggtagttttttttttagggggaaggaaagagggatgtattttagcgaggaagaggttgatagatagtttttattatgtgagtaattttaatttttttatgttatatggtgggtacgtgggtgtttattatattttttttaaatatatgttgtatattggaaatattttttagtatatatgaaagaaaaggtagttaattgaaagtttggtttttgtttttttgttttttatttttttttaatagatgtttgggagttaggtttttattgaatgaattatttacgtttttgtttttgaagggttggtggggggcgtttatgtaatattgttggttttttatattttttaagaggcgttgtttttttgttacgtgttgtagaaaattatttgataagtatttacgttttgtgtagggtgattaggtttattcgtaaaatggttaagattttttcgaaatatattgtttttaaggatgtggtggggagggtgttgggattttgagtgatagtcggcgaatgttagagggaagaattaaattggagagggaggcggagaggagggaggtgatggtgggaggaggaagggaggagcgattaattttttttaatatatttaagtgattagatttattatagtacgaaattttataagttatatttattgttttcgttagtagtcggggaaggttgttgtttttttatttttgttattggaagtttgggatatgtgaagttagacggggagaaacgtgcgcgttttgttgagtagcggtgagtttgaattttgaaatcgattttttttatcggcgaatttttttgtgtcgggtggttaggggaggtagtcgaatgtggttttgaacgaggataggtgagagtttcgagttgagttgtgtagttggggtcggggaatcgtgcgtttcgtgtttttttttagaacgagtaagcgcgtttttaagttgcgtttcgaggttcggcgcgcgttgtcggttgagttgtaggggacggcggcgacgttggttttggttttagggtaaagagattcgggttttgaaagcgttattttttttttttgatttttgtaagcgaggattattgtatgggatatggggtcggggaggagattgcgggattacgttatttatttaggatgcgttttgttcggggttgtttcgttgttcgttgggtaattgtaggttagtgttattgaaaaagaattttatgataggtttgggaattaagtgagaaaaaagtttcgaaggaatatttagaagttgtggttttcgatcgtatttggatgggagttttggagtgggacgtcggaagtttcggggtttttattaattttatatttgattaaattagttcgattttaggtttttggttgtggaggtgtgatttgtttatttggattatttttttaaatgtttgtttttttgtgaaagttagtttatttttggatcgattgtttaagttaattttgtgagaggaagtttgggtggaaggtggtgttgggggttgggattattgtaagtggtagtatgttttagtaaaggataaatttagtttaaatgaggttttttatagataggatttaggttttattttaagtttggagttggttattgggtttttatttggtttgtgtagtttttgtttagtgtgtaggggttagagggaggttattgggttaattgttatttgttgtatttgttttatatttgattaataatttaatagtatattagtagttggagttggtttttgtttttttgtaagcgaattttttatgagaatgtttatagaattattttattttgaggggaagaaatgaaggtgaaaaatgtgtggtttttgttgtatttatagtaagttaaatgtttttttttaggtttggggtgggtataattaggaaaatgttagtagttgattttattattttttttatatcgaagcggaattggtagatttttttagtatatttttttttgaattttgggggtcgggaggtaggttgttggggtcgtagtttgtttagtttgttttgatttttttatttttttgaagttaaagatatagatggagaggaaattatttttaaattaaattagatatggtttagggaagaataataggttgtatgatttagggttagagttttgagttttagtttattttgagtttaagaaaggatttagtagtaggtagatgtgaaattgatgttgatatgaggtttgtgatttatttttttacgtttttttattttataaggaatttttagtaatttatttaataggaaagataattaaattggattttatga

SEQ ID NO: 98 - DNA, 2387 bp, Artificial Sequence
  chemically treated genomic DNA (Homo sapiens)
ttatagtttttgggttttgtttttttttttattgtatttttaaaatgtaaggcgtaacgataatagtaacgttttagttatttttgagattttttaaattttggatttgtttttttttttttttttaaagtttttcgaattttttttagcggataaatgaagggattgaagttggataaaattataatttaggagattagggatttattttattttgtttttcgtgtttggaattagataatttaggacgtcgggttcgagaagtttggataaaaaagttaggaaaaattgagtttcgttttgatttttagcgtcgtggcgggttggtatttgagttggtaacgtgcgtggtaggttatgtaagaaaagggatggaggagtcgttttagcgggagttagaaaggacgcggtgttttcggttgtaatttttattttttttatttagtagggtaggaggtatttaatttggaggagaaaggggtgggggaggtgaaatagagatcggagagttacgagggttgggtcgtcgagagtaggagaatatatcgtgttatatatttttatttttttatatacgttgtagatataaattattgacggtttttacgtgttgcgttcgtgagcggaggtgtttaaagagggggtagatgagttatttttcgagacggaatcgggggttttacgttcgtcgtttttagtagtataattaatttttgaatatttaaatcgcgtatttttggcgtattattattttatttaaggttacgggtttcgtttttttttttttttttttttttttttattttttttttattttttttttttttttattatcgggttttttttagtagtcgtatgtaggggaggagtacggaatgttttttttatagttaattattatttggttgtttttttattggttgagtttttttgtattgtagtaaatgggttatggattttagtaattagagttacgtgttatcggcgatataattaatgagggcgcgagatttgtgtaagtagggggaggtacgtgtcgggtcgtacgtgtttgggagggggggaaggggcggggtttattgagagaggcggaggtgggtagatagattcggagagacggcgaaggagttggaaatcgagttagggttgagtcggttgataataggtaaggagattcggaggataaagcgagttgttagggagtatttgggagtggatttgggggttgaatgtagattttggtattgggagggtttgtattacgtggtaggtgcgagtttagagagatcggcgtagggattttgattttgaaagattgggagagggtaggaggttagtttttatgggggcggttttcgtaggattattaggtgggttcgcgtgtttagattgattgtttgtgggtggtatggttttaggtggagaggtttgttgcggatttaggttggcgaatagttttggcgaataacgggcggaggggaaggtgttttttaagtcggtatttattttgaattgagggaagaaaagaacggaggtcgcgttagatcgagagttgttttgcggcggttagagagggaattttaagtttttaatgggcgggggtgggggtagaaatgtttttttttattgtgtttgagatcggtaatattggggagggggagaataagtattattttacgtagtatattttaattttttagtttattttttaatttttaaattttggttttaaattttttcgttttgttttttagttgtaggtttcgatttttgggtattttaggagttgttttatagtttttgtttttggatttatggattttttatttagcgtttttttttattttttttatttttttttttcgtttttttttatttttttagtgaatagtgattttggttttttttttgatagtgagagggaggataagggggtttatgggtttaggttagatattgttgggtagaggggaggtttacggtttagttcgggttttattcgttgtaggtatcgatcgaaggttttcggtaattagtatatattattttattcgaaatagcggggttcggttttttttatggtaggatttggggcgaaaagattaagagatggtgaattggagattagtttaaatatttaaggttgtattatagagggagatttgttgtttgtttagaaggtaagagaaagtaggtgaaaggagatttttttggagtgttttagtatttagttggttgataaggattttgtgaggatagtattgatttttagatttggaggtgaaggaagagttattgttggtgtgggtagttttttgtttttttatagtttttgttttatttttttatagtgtaaagaattttaaggatttatatttttttttata

SEQ ID NO: 99 - DNA, 2387 bp, Artificial Sequence
  chemically treated genomic DNA (Homo sapiens)
tgtgagaggaggtataaatttttggagttttttatattgtaggaaaataggataaaggttgtaagaagataaaaaattgtttatattagtagtggttttttttttatttttaaatttgggagttaatattgtttttatagggtttttattaattagttgggtgttaaggtattttaggagaatttttttttatttgtttttttttattttttgggtaaatagtaggtttttttttgtggtataattttgggtgtttagattggtttttagtttattattttttgattttttcgttttagattttgttataggagaagtcgaatttcgttgtttcggatgagatggtgtatgttggttatcggaaattttcgatcgatgtttgtagcggataggattcgggttgggtcgtgaattttttttttgtttaatagtgtttggtttgggtttatgggtttttttgtttttttttttattattagaggggaagttaaagttattgtttattggggaggtgggaaaagacgaagagagagagtaggaggaataggaagaaacgttagatggagaatttataggtttagaagtaggggttatagaatagtttttggagtatttaaagatcggaatttgtaattgaagagtaaagcgagggagtttgaaattagagtttaaggattaggaaatgaattgggagattggggtgtattgcgtgggataatatttgttttttttttttttaatattatcggttttaaatataatagaaaaagatatttttatttttattttcgtttattaagagtttgggattttttttttggtcgtcgtagagtagttttcggtttgacgcggttttcgtttttttttttttttagtttagagtaaatatcgatttgaaagatattttttttttcgttcgttgttcgttagggttattcgttagtttgagttcgtagtaagtttttttatttgaggttatgttatttataagtagttaatttgggtacgcgaatttatttggtgattttacgggaatcgtttttatagagattggttttttgtttttttttaattttttaagattaggatttttgcgtcggtttttttgggttcgtatttgttacgtgatgtaaatttttttaatattaagatttgtatttagtttttaaatttatttttaaatattttttaatagttcgttttgtttttcgaatttttttatttgttgttagtcggtttagttttggttcggtttttagttttttcgtcgttttttcgggtttatttatttattttcgttttttttagtgggtttcgtttttttttttttttttagatacgtgcggttcggtacgtgtttttttttgtttatatagatttcgcgtttttattggttgtgtcgtcggtaatacgtgattttagttattgaagtttatagtttatttgttatagtataaaggggtttagttagtagagaggtagttaggtgatgattggttgtaagggaagtatttcgtgttttttttttatatgcggttgttggagaggattcggtgatgagaaaaggaggaggatggaaaaagagtggaaaagaagggaggggaggaaaagggcggagttcgtggttttaaataggatggtgatgcgttagagatgcgcggtttgagtgtttagagattggttgtgttattgaaggcggcggacgtgggattttcggtttcgtttcgggaagtaatttatttgttttttttttgaatattttcgtttacgagcgtagtacgtggaaatcgttagtgatttgtgtttgtaacgtgtgtgagagaatggaggtgtgtgatacggtatatttttttgttttcggcggtttagttttcgtgatttttcggtttttgttttattttttttattttttttttttttaagttgggtgttttttgttttgttgggtgaggagggtggggattgtaatcgagaatatcgcgttttttttggttttcgttggggcggtttttttatttttttttttatataatttattacgtacgttattagtttagatgttagttcgttacgacgttagaggttaaaacgaaatttagttttttttgatttttttatttaggtttttcgggttcggcgttttaaattatttgattttaagtacggggaatagaatggggtaggtttttgattttttaggttatggttttgtttagttttagtttttttatttgttcgttggagaagattcgaaagattttgaaggaggggagggaggtaagtttagagtttagagagttttagaagtaattgggacgttattattgtcgttgcgttttgtattttgagagtataatggagaggagagtagggtttaaggattgtga

SEQ ID NO: 100 - DNA, 2320 bp, Artificial Sequence
  chemically treated genomic DNA (Homo sapiens)
aattatttagacgtaaagtaaatttaagtaaatatttaaaatgtaaaatttatattatttttgttttttcgtaatgtaatggagttataaattataaaagtttaaataaagaagttaattgtttagaaatataaaagtaagggagtaaagaggatatataatgacgtatcgtttgtattaaaataaatataagtatattacgtagtaaacgagatagagtttaaattgttattgggtattaatttgtagttttaatcgcgaatgttattttttaaagttagataaaagaaatatgtggggcgtaaattttaggagtttaggaaaatatttttggtttaaagaggtatgttaagtggtttttatatagatttcgtcgatttattattagaatttttgtaattaatagagattatagtttatatcgtcgttattttcgtaggtggataggtaagttaggttggggaaatggggtgaaatttattatttaatgtcgttttaggttttttgtttttaaagggatttcgtgtttgaggtttatttattatggggtttggggttttggagggttattatattaattttttttgttatttttttttatttttagcgtttacggtgatttaggaattttgtgtttagtcgtttggggtaattttgttcgtttttaatttatttgttaaagttttgagttttaggattttagaatgtgatcgtgtttggagatagggattcgataggggagattaatacgaagtgaggttatatgggtgattttaattttatttgatacgtgtttttataggaagaggagatgaagatatagatacgtatagaggggtagttttgtgaggatacgtggagaagacggcgcgtgcgagttagggagatagaaattaattttgataatttttgattttagatttttagtttttagagttgggggaaagtacgtttttgttgttgaagttgttagtttgtggtgtcgggttacgcgttagtatttacgcgttagtcgagatagtaatagcgagatatttcggataggcggagggcgtgcggtttttttatcgtttatttgaaaatattgtttaaaggtgagtttagtttacgaagtttgtatgaaatgacgcgtttaatagtaggaaggatttgggtggtataaaaagaaaaagagttagggagattaagttaggagaggggagaatgagagtggaaatggtttggttgtgtttttatataaattttattttgaattgtagtttttataatttttatgtgttgtgggagggatttagtgggagataattgaatcgtgggggcggtttgtttatagcgtttttatggtagtgagtaagttttgagatttgatggttttaaaagcggaaatttttttcgtttgatttttattttgttttgtttgttgttacgtaagacgtgtttttcgttttttattaggattgtgaggtttttttagttacgtggaattgtttgttttttaaatttttttttttttataaattatttagttttgggtatgttattattagtagtgtgaaaacggattaatataagattttttaaaggacgtcgagtttagtatttttttaaagtttgaggaattggagcgatatgagggtttggtttaatttttttgatcgttgagttttgattttatttttcggggggtagggagatgtggagtgaggaggtatttattgaatatttttggataagtggaggtcgtagtgggtatttgggtagatagtagtttgtgacgtgtaggttgtttaggaggttggagttgggtgtagggttttatagtagttagtttttgtagttaataagtatttgtgaaatttcgacggcgcgtaatgtagtaatttatttgggttgcgtcgggaggttggttggttggagtcgttgggtttggggtgtttttttgttgtttttttttcgtggattgggggttggtggggacgagttgttttttttagtaatggcgaaggtgttggggagagtagaaaattttttatttttgtaggtttaggtttcgggtttgtatattttttttttcgtttacgtgtttcggggtgagtttagtttagggttaggatacgtatttttttttttgagggaggaacggttttttggtagagggtttggatgtagggtagagtgaaaaattgtggttaattatgttatttgttatatcggtttgagaagttggattgtattttagggtagtaggggttattagtaagtgatagggagttgggttgtagggaggtgggaggtcgagaaatttgtcggaggttattgt

SEQ ID NO: 101 - DNA, 2320 bp, Artificial Sequence
  chemically treated genomic DNA (Homo sapiens)
atagtggttttcgataggtttttcggttttttatttttttgtagtttagttttttgttatttgttgatggtttttgttgttttgggatgtagtttaattttttaggtcggtgtggtagatggtataattggttataattttttattttgttttgtatttaggttttttgttaggagatcgttttttttttagaaggaggaatgcgtgttttggttttgaattgggtttatttcggggtacgtgggcggaggagagagtgtgtaggttcggggtttgggtttatagaggtggagggttttttattttttttagtattttcgttattgttgagggaagtagttcgtttttattagtttttagtttacgaaggagaagtaataaggggatattttagatttaacggttttagttagttagtttttcggcgtagtttagataaattattgtattgcgcgtcgtcgagattttataggtgtttgttggttgtaggggttgattgttatggggttttgtatttagttttagttttttgggtagtttgtacgttatagattgttgtttgtttaagtgtttattgcggtttttatttgtttagaaatgtttagtgaatatttttttattttatatttttttgtttttcgggaggtggggttagaatttaacggttaggaagattgaattaagtttttatgtcgttttagttttttaggttttggggaggtgttgggttcggcgttttttgaagagttttgtattagttcgtttttatattgttgataatgatatatttaagattgggtaatttatgaagagaaagaggtttaagggatagatagttttacgtggttggggaggttttataattttggtgaaaggcgaaaggtacgttttacgtggtagtagataaaatagaatgagagttaagcgagaggagttttcgtttttaaaattattagattttaggatttatttattattatgagaacgttatgggtaaatcgtttttacgatttaattattttttattgggttttttttataatatatgggaattatgggagttgtaatttaagatgagatttgtgtggggatatagttaaattatttttatttttattttttttttttttgatttggtttttttgattttttttttttttatgttatttaggttttttttgttgttgaacgcgttattttatgtaggtttcgtggattgggtttatttttaggtagtgtttttaggtgggcggtgggaaggtcgtacgtttttcgtttgttcggagtgtttcgttattgttgtttcggttggcgcgtgggtattggcgcgtaattcggtattatagattggtagttttaatagtagaaacgtatttttttttagttttggaggttggaagtttgagattaggggttgttagggttggtttttgtttttttggttcgtacgcgtcgttttttttacgtgtttttatagggttgtttttttgtgcgtatttgtgtttttattttttttttttataaggatacgtgttagatgggattagggttatttatgtgattttatttcgtattaattttttttatcgagtttttgtttttaaatacggttatattttgaagttttgggatttagggttttgatagatggattggaggcggatagaattgttttagacggttgagtataaagtttttgggttatcgtgaacgttggagatggggagaggtggtaggggggattagtgtgatggttttttaggattttaagttttatggtgggtggattttaggtacggggtttttttaggggtagggggtttaaggcggtattgagtggtgggttttattttatttttttagtttagtttgtttgtttatttgcgggagtggcggcggtgtgagttgtggtttttgttgattgtagggattttggtggtgggtcggcggggtttgtgtgagggttatttgatatgtttttttaaattagaagtgtttttttaaatttttggggtttgcgttttatatgttttttttgtttgattttaagaaatggtattcgcggttgaagttatagattgatgtttagtgatagtttgggttttgtttcgtttgttacgtagtatgtttatatttattttagtataaacgatacgttattgtatgttttttttgtttttttatttttatatttttaagtagttggtttttttgtttaaatttttatgatttgtagttttattgtattacgagaaagtaagagtggtgtaaattttgtattttaaatatttatttagatttattttgcgtttaaatggtt

SEQ ID NO: 102 - DNA, 2728 bp, Artificial Sequence
  chemically treated genomic DNA (Homo sapiens)
tttttatttataaaattaagttataaaagaaaaaaagaaatagtggaatgagaggtaagagcgcgtaagtaagagtaggtgtgaacggttgtatgcgatggtattcgttatagttgggatattagagagagttagattttaggttagatgtattataggggttttaggatagtttatcgttttttttttaggattggttttggtatgtaattttagtagttttaggtagttgtttttcggcggaatttttaggagtgggggtatttattagcgttgatttgcggggttttagttgaggatagttcggtcgtgggagtttataaagtaatggataataggtaatgttttttttgtttaatagtagtggttagagggatagatttatttttatagagattgttaggtattgtcgttatagatacggtttttttttcggtatttagttttgtttgttttatataggagtataggaaaggaatttttaatgagtttattttttatgttaggagagaggtaaggtgttgagttttttattcggggagtttagttgtattttttttttagtttttatttttttgatttttttttttttttattatttttaattagtggtttattattttttttttagttagttttggttgtgatgttaagcggttttgtcggattttatattttgtttggtttttaaaagggtattgatttgagggtataaatgtagaggtttcggggtagttaggtagtcgcgagtaatttagtatttagttgtttagggtgttttaggtagcggcggtagtagttagaagttggtgttattattatataagttaggtaaattttgttttagtatatagagcgtatttaattagtaggaaggaaataagttaaaattttttcgatattatatatatatatatatatatatatatatatatatatatatatacgagtttgaggataaggataaatattttgtagaaagaattttttttttattttatcgacgtttaagtttttgttttaggattttttattttttagtagtttttaaaattttcgtgtttgattattttttttaatatatgggatagagagaatttggttaattttaaattttgttttttgagtatttgtttataaatagtagggggagtgatggggacgtttttttgttttttttattatttttatttttgttttttacgttatttttaggttgatagcgtcggggaaagatattagattattaatttagttttttttgttagttggggaaataatattcggttattaatagtatttaattatttagagagcgagagtgagtcgaggtaaatacgtcgggttttagatatcgttttagttttcgagattcgggtttgtaaagggttgtatacgttcgtcggagggtcgttgtcgttttcgagaaaggatttgaatttgagttcggtgaaggtaaaatgatatagagatttatttttaggttgtgtgtggggttgacgatatagataagttgttcggtagcggagaaaattcgtttagttttgtagtgttgaaatcggagatgaatgagatttaatatagttttaaagtattgggtaaagaaaagtattataatttttggggggttgttggttcgggaaggtagcggaggaagttgtgagtttttgggttttggaaggagcgtagtttttgagatatttcgttttagttcggtttagcgcgtttttatatttattattaaaataagacggttagaattttgtagtagtgaggcggttaattaaaaggatagaaatgttatttttgaggtgtagagatagttaataataaatgttttttttatcgaaattttttgatgaattgagtttggcggagaatgtattattgaatattattatagattagtatattgtatttattttgtgattatagttaattatatttaatgttggggagataggttgataaaattgattgtttaatgtgtttttatttattaattgatttaatttaatatgagagttttttttaatgttttggtaagaacgtaaagcgtttaagtcgttaaatagtataatatttcgttttaaagtaggtagatggataacgtagattatggttcgatttattagagttgtttgggagaaaataaaatattattagattttgaatttagataaggatttggtagtagtaaaaatgtgtattttttaattttgcgttttgattttttgtaatttggattatagttttttgataaattttattttttattttttattaaagaaaagaatttttgataaatttatttggagttgaggggtggagggaagtatatatatatatattattatatatatatatatatttttttttttttaaaatattgtgattattgaagtttgaaagtattaaaggataaaaatgtatagagtatgttttaaaaaataatgaaatttttgatgtatgaatgtatatatatagaaaaatttatattgagaggaaagaggtttgtaaattagtaaaataattatagatgtagagaatttttgtttgttatttatttgtatattggtgggtagtaaattgttaattaattattagattgttggagatattaaaatagagattaaggatgtatatattatattatttatttgtttttgtaaatgttagtagtatatttttgtgttggtataggtagagggtattttagtttttagat

SEQ ID NO: 103 - DNA, 2728 bp, Artificial Sequence
  chemically treated genomic DNA (Homo sapiens)
gtttgaggattggaatgttttttgtttgtgttagtatagaaatgtgttgttagtatttgtagaaataagtaaatgatgtggtatgtgtatttttaatttttattttaatgtttttagtaatttagtggttaattagtaatttgttgtttattaatatgtaaatgaatgataagtaaaggttttttgtatttgtaattattttgttgatttataagtttttttttttttagtgtaggtttttttgtgtgtgtgtatttatgtattagggattttattattttttgaagtatattttgtgtatttttattttttaatatttttagattttagtaattatagtattttgaaaaaaagaaaatatatatatatgtatagtaatatatatgtatgtgtttttttttattttttaattttaaatgaatttgttagggatttttttttttgataaagagtggagagtaagatttattaaggggttgtaatttaaattgtagaaagttagaacgtaagattgaaagatatatatttttgttgttgttaagtttttatttggatttagagtttagtaatattttatttttttttaagtagttttggtgagtcgagttatgatttgcgttatttatttgtttattttggagcggggtgttgtattatttggcggtttaaacgttttacgtttttgttagggtattaagaaaggtttttatgttaaattaagttaattaataaatggagatatattaagtaattaattttgttagtttatttttttagtattaggtatggttggttgtaattataagataaatgtaatgtgttgatttatggtaatgtttaataatatatttttcgttaggtttaatttattagggagtttcggtagggaaggtatttgttattggttgtttttgtattttaaggataatatttttgtttttttgattggtcgttttattgttgtaagattttaatcgttttattttgatgatgaatatgaaggcgcgttaagtcgggttggagcggagtgttttagaggttgcgttttttttagggtttaaggatttatagtttttttcgttgttttttcggattaataattttttaaaagttgtgatgtttttttttatttagtgttttggggttgtattagattttatttattttcggttttagtattataaggttaaacgggtttttttcgttgtcgggtaatttgtttgtgtcgttaattttatatataatttaaaggtgagtttttgtgttattttatttttatcgggtttaggtttaagttttttttcggaggcggtagcgatttttcggcgaacgtgtgtagttttttgtaaattcgggtttcgggggttgggacggtgtttggaattcggcgtgtttgtttcggtttattttcgttttttaggtgattgggtgttgttagtgatcgagtgttgtttttttagttggtaggaaaagttggattgatggtttgatgttttttttcgacgttgttaatttgagagtggcgtggggggtagaagtgagggtggtggagggaataggggggcgtttttattattttttttattatttgtgggtaagtgtttaggagataggatttgaagttagttaaattttttttgttttatgtgttgggagaggtggttaaatacgaggattttagaagttattggggggtgaggaattttgaaatagggatttggacgtcggtggggtggggggagggttttttttgtaaagtgtttgtttttgtttttagattcgtgtgtgtgtgtgtgtgtgtgtgtgtgtgtgtgtgtgtgtgtgtggtgtcgggaggattttggtttattttttttttgttggttagatgcgttttgtgtattggagtaggatttgtttggtttgtgtaataatgatattagtttttagttgttgtcgtcgttgtttggagtattttaggtagttgggtgttgggttgttcgcggttgtttagttgtttcggggtttttgtatttgtatttttaggttagtgtttttttagagattagataaaatatggggttcggtagagtcgtttaatattatagttaagattgattgggaaaggaatgatgggttattggttaggggtagtagggaggaggggaagttagggaggtgggggttggggagagggtgtagttgaatttttcggatgggaaatttagtattttgttttttttttaatataaaagatggatttattggaagttttttttttgtatttttgtgtaaggtaggtaggattgagtgtcgggggaggggtcgtgtttgtagcgatagtgtttgatagtttttgtgaggatagatttgtttttttgattattgttgttgggtaggaagagtattgtttgttgtttattattttataaatttttacggtcggattgtttttagttggagtttcgtaggttagcgttgatgggtgtttttatttttagaagtttcgtcgaaagatagttgtttggagttgttggggttatatgttaaggttagttttgggggaggggcgatggattattttgggatttttatggtgtatttgatttaggatttgattttttttgatattttagttgtgacgaatgttatcgtatgtaatcgtttatatttgtttttgtttgcgcgtttttgttttttattttattattttttttttttttttatagtttagttttataaatgagaa

SEQ ID NO: 104 - DNA, 2673 bp, Artificial Sequence
  chemically treated genomic DNA (Homo sapiens)
gttaggtgattttttcggagtatcgattggggtcgtaggcgttttgtttcgtcgttttcggagtttgtttttggggagtgggggtggtcgtaattattagtcgcgaggagaggattgtatttttttttttcggtcggtattcgaatagagttagtttttatttttgtagtggcgaagtgtttataaagttcgcgtcgcgtcgtcgatttagagttgggtaggaagtggggaagagggggcggaggagataaaggggttggtgttttgtttagttaagtttcggttttcggtttgatttttttattttttgtatattttcggcgaggttaggaggtttattcggcgtcgcgtattttcgttcgtagttttcgttttacgcggtataggtgcgggggcggggcgttacggaggtttaggtgtgggcggcggggtcggggtagtacgggttttcggatcgttgtttttcggcgttggtaatttttttacgtgttatttaggaagtaaataatattatgaggagcgattttttttttttttttttttttttgagatggagtttttttttgtcgtttaggttggagtgtagtggcgcgatttcggtttattgtaattttcgtttttcggatttaagttatttttttgttttagtttttcgagtagttaggattataggcgtacgtcgttacgttcggttaattttgtgtatttttagtagatacggggttttattatgttggttaggttggtttcgaatttttgatttgaggtgatttattcgtttcggttttttaaagtgttgggattataggcgagagttatcgcgttcggtcgattttttgatttttattatacgttaggtattgtgatagattttttttgtgtattattttattttttttttagttttatagaagaggaaattgagatatattgaggattaaggttaagtgttcgaagtattatagttggttagtgttaggatttaagtttagaatttgcgttttgttaggtatttgtaaatggggacgaatacggcgtagttagaggggttgataggttagggagaaaattattggtagtcgcgggtattttacgttttgggagtgaggcggtaagggataagtttttcgttttttagatttgtttcgtaaatatttgcgggtcgagggcgcgaaggtagtaggatgtagcgatagatttggattaggtggtttaggttttatttttaagtgggttattgataggcggggcggtttttagtataaaattattaggttggatgttttagggttttttaatattattcgtttagaagaattatttggggagttttttaatgagaaagatttttaagttttttttttagagagtgaagttattgggattgggttgggtttagttaggtgttattaataataagataagtttggaaaattttgcgagtgtagatgattttttggtatgttttttataagaatcgatttttatattaaaataggttttttttaatttagtgaaatcgggcgcgtttttttggtttataattaagttattgaaggttttagaatattttatttttaaaaggttacgtgaggttggcgcggtagtttacgtttgtaattttagtattttgtgaggtcgaggtcgcggattgtttgagtttaggtgttcgagattagtttggttaatatggcgaaattcggtttttattaaaaatataaaaattagcggggcgtggtggtgttcgtttgtaattttagttatttcggaggttgaggcgggaggatcgtttgagtttgggaggtggaggttgtagtgaatcgagatcgcgttattgtattttagtttgtgaaacggagtaagattttgtatttaaaaaaaaaaaaaaaaagttacgtgagtcggggttatcggaggcgttttttaatcgattgggtttcggaaaattaaggggcgtacgtcgtttcgtttcgtttcgtttcgcgattataagttttatcgcgtttcgcgttcgcgtatattacgttagaataagatggtcgacgcggcggttatagttggggtcggtggtttcggaacggtaagggtaggaagcgcgggttcggagtcgagagagtttgggtattttgtaatttttttttcgattgagtaataagataatgtttagaaatttagttttattatgagtttcgattggcggagggtgtttttaggtcgtaggcgttttttttttgggatttggttgcggttttcggagttggcggatttgtgttttgattggttcgttcgttgttgggggttgggagttcggaatattttcgattggtttgaagatgtcgttttcgtttttttattggtcggttaaagttgaaaggtattttcgttttaaaatatttagtttttttatttttttgtgtttttattttttgttttttttttttcgcggttattttttgttattgtttttatttttttttttaatgaaatggtgtgaagatgggaggtataagagagggattttgttttttttgcgggatacgttttaattttattatgcgtgtttttttagttatgtattttaataatttgttaaagtagaaagtaaaagatttgttattttattttattgggattgtacgttttaggtaagcggagaagtggtttttgtattta

SEQ ID NO: 105 - DNA, 2673 bp, Artificial Sequence
  chemically treated genomic DNA (Homo sapiens)
taaatatagagattattttttcgtttatttaaaacgtatagttttaatgagataaaatagtaggttttttattttttattttagtagattattagaatatatagttgaagaaatacgtatgatgggattaagacgtgtttcgtagaaaaaataggattttttttttgtgttttttatttttatattattttattgaaagggaaaatgaaaatagtaataagaggtgatcgcgaggagaggagggtaaaagataaaagtataaaaaagtaagaaagttaaatattttgaaacgggaatgttttttaattttggtcggttaataagaaggcgaaaacggtatttttagattaatcgggggtgtttcgggtttttaatttttaatagcgaacgagttaattaagatataggttcgttaatttcggaggtcgtagttaagttttaaggagggggcgtttacggtttgaaaatatttttcgttagtcggagtttatgatggggttgaatttttgggtattattttgttgtttagtcgaggggaaagttgtaggatatttaaattttttcggtttcgagttcgcgttttttgtttttatcgtttcggagttatcggttttagttgtggtcgtcgcgtcggttattttgttttggcgtagtgtgcgcgagcgcggggcgcgatgggatttgtagtcgcggggcggggcggggcggggcggcgtgcgttttttggtttttcgaagtttagtcggttgggggacgttttcggtgatttcggtttacgtgattttttttttttttttttggatatagagttttgtttcgttttataggttagagtgtaatggcgcgatttcggtttattgtaatttttattttttaggtttaagcgattttttcgttttagttttcggagtagttgggattataggcgggtattattacgtttcgttagtttttgtatttttagtagagatcgagtttcgttatgttggttaggttggtttcgaatatttaagtttaagtagttcgcggtttcggttttataaggtgttgggattataggcgtgagttatcgcgttagttttacgtgattttttgagagtgaagtgttttggggtttttagtggtttggttgtgggttaggaaaacgcgttcggttttattgagttaaaagaaatttattttaatatgaaaatcggtttttataaagagtatattaggagattatttatattcgtagggttttttaaatttgttttattattagtaatatttggttgggtttagtttaattttagtgattttattttttggaagaggggtttgggaattttttttattaaggagttttttagatgatttttttgagcgagtaatgttgggaaattttggagtatttagtttggtgattttgtgttgagggtcgtttcgtttgttaatggtttatttggaagtagagtttggattatttagtttaagtttatcgttgtattttgttgttttcgcgttttcgattcgtaagtatttgcgaggtaagtttagggggcgggagatttgttttttgtcgttttatttttagggcgtggggtgttcgcggttattagtggttttttttttagtttgttagtttttttagttgcgtcgtgttcgtttttatttgtaggtgtttggtaggacgtagattttgggtttggattttaatattagttagttatggtatttcgggtatttgattttaatttttagtgtgttttagtttttttttttgtaaagttgggggaaagatgagatgatatatagaaagagtttgttatagtgtttgacgtgtagtaagagttaagaaatcggtcgggcgcggtggttttcgtttgtaattttagtattttgagaggtcgaggcgggtggattattttaggttaggagttcgagattagtttgattaatatggtgaaatttcgtgtttattaaaaatatataaaattagtcgggcgtggcggcgtgcgtttgtagttttagttattcgggaggttgaggtaggagaatagtttgaattcgggaggcggaggttgtagtgagtcgagatcgcgttattgtattttagtttgggcgatagagggagattttattttaaaaaaaagaaaaagaaaaagaagtcgttttttatgatgttgtttattttttggatagtacgtggaggagttgttaacgtcgggaggtagcggttcgggaattcgtgttgtttcggtttcgtcgtttatatttgagttttcgtggcgtttcgttttcgtatttatgtcgcgtggggcgggggttgcgggcgggggtgcgcggcgtcggatgagttttttggtttcgtcgagggtgtatagggggtgggagagttaggtcggggatcgaaatttggttgagtagagtattagtttttttgtttttttcgtttttttttttttattttttgtttagttttggatcggcggcgcggcgcggattttgtaaatatttcgttattgtaggggtggagattggttttgttcggatgtcggtcgggggggagaggtgtaatttttttttcgcggttggtggttgcgattatttttattttttaaaggtaggtttcggaggcggcgggatagagcgtttgcgattttagtcggtgtttcggggaggttatttgat

SEQ ID NO: 106 - DNA, 2508 bp, Artificial Sequence
  chemically treated genomic DNA (Homo sapiens)
ggagaggttggaaaaatgagttttgaaattgtagttttataaaagtaaaattgagaaaagatataatagtgatggagaaagttagacgggtattaaaaaataaaataggagttttttttaggtcgcgtttatacgggttcgtcgcgttcgttcgttattatcgatattttattttttgtttttcgtatgggaggggtaagaacgcgattcgttcgtagtttttaggtaggtgatgaggatagttagtttcgcggtttttcgttagttggcggcgggggtcggttaggtgttcggatttttcgagggttttatcgtcgcgcgtttcggggatcgggatcgttattcgcgttttatttgcgcgttcgggttttagggttttgttttcgggcggtggcgcgggtttggttttcgtcgtagttacgatcgtttttatcgttttcgtcgttttcgttcgggaagtggcgagtcggttcggtttgtttcgttcgtttttcggttcgtatttacgttttatatcgtgtagtttggttcgttttttttttagtttgtttttgaggttttcggtttcgttttttagcgacgttagcgtttcgttttcgtgtagtttttcggttgttattttcgcgcggggacgtagcggagagggaagcggagagcgggaatgcgttgagtcgcggcgggcgtcgttttagtagtcgttttcggtttcgagtatcgtttcgcggtttcgtttttcgcgatgacgttagtagttgcgggttcggttgttgcgtttgagttttaagatttcgtatttgggcgcgcgttttggcgtagtgtttggtgcgatgttcgcgttagtttttttttttcgggagaggtagggagtgtgacgtttattttattagcgggtaaattgtggtttagggatgttgggtgatttgttcgaggacgtatatagagggaagggttaagtcgggattttaattcgggatttttcgtttttggggagatcggtgaggttttcgcgatatggtttttttatttttaagtttttcgtgtagattttcgttttgtgggatttgattgcgggttgcgggttcgtggtttttgtaggtagagagaggacgggagaggagacggttacgaggtttggtcgtaggtagttacggtgtttttttaataaggaatcggaaatttttttcgtttgttgatttaaatatataaaaataaaattagttgttgggtttttagacggagtttttgcggtattaggaggtttatttttatttttttttttttttacgtaggaattaggtttttggtttgggggcggtaaaaggagatggcggtgggttaagtgggcgcgtaggtttagatttggggtttttgagtttacgtttaggtatttcggattttttatttttgaggttattttttgttttttagaatgaagggttggtatagttttgttaggatgtacgtttagcgatttttgttagattgaagtatttttttttcgtaagcgtttgaagtgtgagaggtattgttttaagtgttttaatttgtatttgtttaatttttataggagttaatttgaatgggtatatttatttttattttatagaagaggaaattggggtatagaaagattgagtaattgtttagggggtatgttttaagaaagagggagagataggatttggatttagataggttggttttttagtgttttggattttggtgtggatgatttaatttaagttttttttttttttttttttatgtgattttgtatgcgtttgtgtagagaatgagaaggtagattaaagttatagatgttgcgagaatatcgttaagtagaattttgggtgttgtttttatttttttgtatttgtttttttttagagaagttagtttttatttgttgtttcgggttttttttatttgagaaaagttgaaggtattcgatgttaatttgtatatagttgttttgtaggttagagtttgggatttttcgtttttttatttggaaaagtttttttataggatttgttttataggattgttatgagaattaagtaagatggtgtgggtcgggtgcggtggtttatatttgtaattttaatatttcgggaggttaaggtgggtgtattatttgaggttaggagttcgaaattagtttggttaatatgatgaaattttttttttattaaaaatataaaaattagtcgggcgtggtggtacgtgtttgtaattttagttatttaggaggttgaggtacgagaatcgtttgaattttggaattagaggttgtagtgagtcgagatcgtgttattgtattttagtttgggtaatagagtaagatttaaaaaaaataaaaataaaaataaaaataaaataaaaaaaggtaagatagtgtgggtgaagattttagtagattttttcgtatatagtagatgtttatttattgttagttttttttttcgtttttattcgtataataataggtttatttgtcgttgtttt

SEQ ID NO: 107 - DNA, 2508 bp, Artificial Sequence
  chemically treated genomic DNA (Homo sapiens)
ggaatagcgataagtaaatttattattatacggatgggaacggaaaagagaattagtagtgaataagtatttgttatgtacggagaagtttgttaaagtttttatttatattattttatttttttttgttttgtttttgtttttgtttttgttttttttgagttttgttttgttgtttaggttggagtgtagtggtacgatttcggtttattgtaatttttgattttagggtttaagcgattttcgtgttttagttttttgagtagttgaggttataggtacgtattattacgttcgattaatttttgtatttttagtagagagagggttttattatgttggttaggttggtttcgaatttttgattttaggtgatatatttattttggtttttcgaagtgttgggattataggtgtgaattatcgtattcggtttatattattttatttaatttttataataattttatgaagtagattttatgaagaagtttttttagataaggaaacggaggattttagattttaatttgtaaaataattatgtatagattaatatcgagtatttttaattttttttagatagagaaggttcgggatagtaagtggaggttggtttttttgggagggagtaggtatagagaggtggggatagtatttaagattttgtttggcgatgttttcgtagtatttgtaattttgatttgtttttttattttttgtataaacgtatgtaagattatataggagggaaaaaggagaaggtttgagttggattatttatattaaagtttagagtattagggagttagtttgtttgggtttaaattttgttttttttttttttttggagtatgttttttgagtaattatttagtttttttgtgttttagtttttttttttgtaaagtgggaataagtgtgtttatttaagttgatttttgtgaggattaaataagtgtaaattaaagtatttagaatagtgttttttatattttaggcgtttgcggagaggggatgttttagtttgatagaagtcgttaaacgtgtattttggtagaattgtgttagttttttattttaaagggtaggaggtggttttagaagtgagaggttcgagatgtttgggcgtgggtttagaagttttaggtttgagtttgcgcgtttatttgatttatcgttatttttttttgtcgtttttaggttagggatttgatttttgcgtgaagaaaagagaaaataagggtgggttttttaatgtcgtagagatttcgtttgagaatttagtaattagttttatttttgtatatttagattaataaacgaagagggttttcggttttttgttgggggagtatcgtagttatttgcggttaagtttcgtagtcgttttttttttcgttttttttttgtttgtaggagttacgggttcgtagttcgtaattaagttttatagagcggagatttgtacgagaggtttggggatgggagggttatgtcgcgggggttttatcggtttttttagaagcggggagtttcgagttggaatttcggtttggtttttttttttgtgtgcgttttcgggtaaattatttagtatttttaagttatagtttgttcgttggtaaaatgggcgttatattttttgtttttttcggaggagagaggttgacgcggatatcgtattaggtattgcgttagagcgcgcgtttaggtgcggggttttggggtttaggcgtagtagtcgggttcgtagttgttggcgttatcgcggagggcggggtcgcggggcggtgttcggggtcggggacggttgttggagcggcgttcgtcgcggtttagcgtattttcgtttttcgttttttttttcgttgcgttttcgcgcgaagatggtaatcgaggggttgtacgagaacgagacgttggcgtcgttgaagagcgaggtcgagagttttaagggtaagttggaggaggagcgagttaagttgtacgatgtggagcgtgagtgcgggtcgggaggcgggcggggtaagtcggatcggttcgttatttttcgggcggggacggcgggggcggtgggggcggtcgtggttgcgacgggagttaggttcgcgttatcgttcgggagtagggttttggggttcgggcgcgtaggtgaggcgcgggtagcggtttcgattttcgggacgcgcggcggtggggttttcggagggttcgggtatttggtcgattttcgtcgttagttagcggaggatcgcgggattagttatttttattatttgtttggaagttgcgaacggatcgcgtttttgttttttttatgcggagggtagggggtggggtgtcggtggtgacgagcgagcgcggcgagttcgtgtaggcgcggtttaggagagatttttgttttgttttttaatgttcgtttggttttttttattattgttgtatttttttttagttttgtttttatgagattgtaattttaaagtttatttttttaattttttt

SEQ ID NO: 108 - DNA, 2535 bp, Artificial Sequence
  chemically treated genomic DNA (Homo sapiens)
ataatggttttttggaattttttggaataaataagataaattaatatattagagtcggtagcgggggtatatcgtgtttttttagaaaaggattaaggggagtggttttagtaacggaatatgagggatttttttatatggatataaagtattaagggataggtcggttttgtttttcgtttttttttagttgtttaattaggatttatttagtttatagtgttttattttatcgggtttttttggagttagttggagatgataaaaattatataggtattggagttagatagttttatatgttatttttatttgagaaatttgggtgagttatatttttttaggttttagtttttgtatttgtagaaggaagagaagataatttatttttaaagcgttgtgataatttagtgagatgatgtttgttaagtttattatatagggtaagttggttttttttcgtttttcgtatttgtttttattgagggtgaaggtagtagagaagatattattagtagttgtttattattgtttggttttggagagggagggattacgtatttttatttaattatattaggtcgttatcgtttgtatgtatttcgtgtttaatcggggttttgaggtagcgtttcgttttttttggatttttttagatattttaggttggaatggtgaggggtaggtgggagtagttaggtttttttttgggtaagtcgtggtgagttattcgtttatttcgtagcgggaggcggtcgggtttgggggttttattgttagggttcgatttagagggtagttcggagtcgttgggtcgtattattacgaagattcgtttgtgtagaagttcgtcgggtcgttcggagtaggtttttttgtggtttttcgacgggcgcgggtagaggcgggcgcggaaggcggtttggaagtcgcggcggaagttttcgttgaagtagtcgtagatgatggggttggcgttgttgttgaagaaggttagttagtgcgcgaaggggaaggcgtagacggtgattaggtgtagttgcggcgcgttgagttgttcgtagtcgatgagtagtagtagcgtttagagcggtagttaggatagcgtgaagaatagcgttattatgattagtatgtgtattacgcgcgttttgcgtcgcgatgttcgcgggttcgtagttttttcgttttcgggggtcgggttcggggtttggtagagtttgcgcgcgatgcgggcgtatatgattacgatgagcgttagcggcgttaggtagatgtgcgagaagagtatagtggtgtagattttgcgtatgtttttttcgggttaggttttttagtaggagtagagcgggtaggagcggttgcgggcgtttattatgaagtggtgttttttacgggtgacggttagcgtgacggtcgagggatatatgatgagtagcgttagggtttagatgacggcgatggtgacgagcgtttttcgtagggttagtttttcgcggaaagggtgtacgatgtagcggaatttgtcgcggggagagagataggcgggatttgggtgggttttagggtttttgcgaggggacggtgggtgggatgcgggtatttgatttttattatcgtatttagggcggcgtcgaagaatagtttagatttgaattggttgagtagttaaagaataaaggtagttataggatttatgagaagggaggaggaaatcgtagatcgtgtgggaataatgaattttgtgtgtatttttgtattttttttttttttttttttttttttttgagatagggtttttttttgtcgtttagtttggagtgtagtggcgcgattacggttttttgtagtttttatttttcgggtttaagtgattttttttttttattttagttttttgagtagttggaattataggaatgcgttgttatttcgtcggttaattttttttaatttttggagagatgaggttttattgtgttgtttaggttagttttaaagttttgggtttaagttatttttcggtttcggtttttcgaatttttgggattatagatatgagtttttttgcggggttatttgtgtatttttgggggttaattgattagttggtagttagtagagcgattagagtgcgtagtttgttttcgataaggacgattaggtgcgttaaataatatagtttttgtttatggattttttagaaaattttaggaggttagatgtagagtttatatgttaggttgtttttatgttattttggttatagtattagtatttttataatgtaaggataagtttgtattatttatttttttatgaggataatttagtatttgttattatattttttattattttttaaaggtgaggtttttaagatagttattatattgttgatttatagataaggaaattgggattcgagtgttaagtagttggtttaagtttatatagtaagttgtaaggattagttttgaatttagatttgttttgttttatatgttatataaattagtagttgtaaatttttta

SEQ ID NO: 109 - DNA, 2535 bp, Artificial Sequence
  chemically treated genomic DNA (Homo sapiens)
tggagggtttatagttattggtttatatggtatatgaagtaagataaatttgggtttaagattggtttttgtaatttgttatgtgaatttgagttaattgtttaatattcgagttttagtttttttgtttgtaaattaatagtgtagtaattattttaaaggttttatttttaaaaaataataaagggtgtaataatagatgttgagttgtttttatgaggaaataaatggtgtagatttgtttttgtattgtagagatattgatattatggttaagatgatatagggatagtttgatatgtaggttttatatttgattttttgaggttttttggagaatttataaatagaaattgtgttatttgacgtatttaatcgtttttgtcgaggatagattgcgtattttgatcgttttgttagttgttagttaattagttgatttttaaaagtatataaatggtttcgtaaggaggtttatatttataattttagaaattcgggaggtcgaggtcggaggatagtttgagtttaagattttgagattagtttgggtaatatagtgagattttatttttttaaaaattgaaagaaattagtcggcgaggtggtagcgtatttttgtggttttagttatttaggaggttgaggtgggaggagaggattatttgagttcgggaggtggagattgtagggagtcgtaatcgcgttattgtattttagattgggcgatagaaggaggttttgttttaggaaaaaaaaaaaaaaaaggagaaaagtgtaaaagtgtatataggatttattgtttttatacgatttgcggtttttttttttttttttataaattttgtagttgtttttgttttttgattatttagttaatttaggtttgagttgtttttcgacgtcgttttagatgcgatgatgaaggttaggtgttcgtattttatttatcgttttttcgtaggggttttaggatttatttagatttcgtttgttttttttttcgcggtaggtttcgttgtatcgtgtatttttttcgcgagaagttgattttgcggaaggcgttcgttattatcgtcgttatttgggttttggcgttgtttattatgtgtttttcggtcgttacgttgatcgttattcgtgaggagtattattttatggtggacgttcgtaatcgtttttattcgttttatttttgttgggaggtttggttcgagaagggtatgcgtagggtttatattattgtgtttttttcgtatatttatttggcgtcgttggcgtttatcgtggttatgtacgttcgtatcgcgcgtaagttttgttaggtttcgggttcggttttcgggggcgaggaggttgcggattcgcgagtatcgcggcgtagagcgcgcgtggtgtatatgttggttatggtggcgttgttttttacgttgttttggttgtcgttttgggcgttgttgttgtttatcgattacgggtagtttagcgcgtcgtagttgtatttggttatcgtttacgttttttttttcgcgtattggttggttttttttaatagtagcgttaattttattatttacggttattttaacgagaattttcgtcgcggtttttaggtcgtttttcgcgttcgtttttgttcgcgttcgtcggggagttataaggaggtttatttcgagcggttcggcgggtttttgtataggcgggttttcgtggtggtgcggtttagcgatttcgggttgttttttgagtcgggttttagtagtggggtttttaggttcggtcgtttttcgttgcggaatgggcgggtggtttattacggtttgtttagggaagggtttggttgtttttatttgttttttattattttagtttgggatatttgagggggtttagggagggcgggacgttgttttagggtttcgattggatacgagatatatgtaggcgatagcggtttggtgtggttaggtgaggatgcgtggtttttttttttttagagttaggtagtggtgggtagttgttggtgatgttttttttgttgtttttatttttagtagaggtaaatgcgggggacgggaaggaattaatttgttttgtgtggtgggtttgataaatattattttattgaattgttataacgttttggagataggttgtttttttttttttttatagatgtaaaaattgaggtttggagagatgtgatttatttaagttttttaggtggaaatggtatgtgaagttatttgattttaatatttgtgtggtttttattatttttagttggttttaagagggttcggtaaggtagaatattgtgaattgagtaagttttaattaggtagttaggaagaagcgaaaagtaaagtcggtttgttttttgatgttttgtgtttatgtgagggagttttttatgtttcgttattgaagttattttttttgatttttttttagaagaatacggtgtgttttcgttgtcggttttaatgtgttggtttgttttgtttgttttaagaagttttaagaagttattgt

SEQ ID NO: 110 - DNA, 2346 bp, Artificial Sequence
  chemically treated genomic DNA (Homo sapiens)
gattttattttaaaaaataaaaaataaaataaaattaaaaagttaataaaaataaaaaacggttaggcgtggtggtttatatttgtaatttcggtattttgggaggtcgaggcgggtagattatttgaggtcgggagtttaagattagtttgattaatatggagaaattttatttttattaaaaatataaaattagtcgggtatggtggtgtatgtttgtaattttagttattcgggaggttgaggtaggagaatcgtttgaatttgggaggtagaggttgtggtgagttgagatggtgttattgtattttagtttgggtaataagagaaaaattttattttaaaaataataattaaattaaaaaataaaaaataaaaaggtagatatttgaagatatacgggatgtacgttggggaggtttcgttgttattttttgtttttagtttcgtttataatgtgtatttgggggtttagaggtggtatagttttgtttgtttgggtaggagggtttggtgttgatttggtggggtttggtttttttgagtattttttataagggtttgattgtgggtgaggggcgtagggagtagtcggttttaagttgggtattgttttgtgagtttgggggtagtttagggttttttagattatattgtttaggtcggggttggtttcgttggttgagtgggtttttgtttttatgggattttgttttgtagttgatttttaaggttaaggaggttttagtggggtggggtttggttttggatgtggttgacgtgtgttggggttgtttggggtttaggcgttgtgtttcgtttttaggagttggaatagtagtttatgatggagaaaagaaattatcgtaagattttgaagttttattagaaatttttatagaaggaaaagaggaataaaggtaaggtttttgtgggtataggttcgagattttggttgtaggtagttcggtttttatttattttgttttatttataggtttcgacgttaagattatgttgtttaagttgaaagggtagttagaagaaatgaaatttagggtgtaattttttagtttggttaagaagtatttgtaggtaagtgggtttcgggtttcgttttgtttcgtgaggtagtagttttagacgggttttttattgttggatgttgtaaatttgttcgtgtgaagttataaaaggggttttgatttgagggtttaatgttaggaagttttggggcgaggggtagagtgattaagcgttcgtgtttcgtttcggtaggttatgtacgcggaacgttggggtttggagttttgtatttttttagtgatcgtgaatatcgcggtcgtattttgcgatacgttggattttagttttttggacgagtttttttcgtttattttttataacgttaataagtattcgggcggtcggtagaaggttcgtattttgtaggtcggtacgtcgttggggtttatggtttatttgtattttaggtgcgttgggagaaaagtttattcggaaaaggagacgtagttcggggtgttgagaagagggggggaacgtgttttcgttagttagttaggttgggtttgtattttttagtttagagaaatgtttaatcggggtttaggttaatgtgtattaggtgttatcggtagttttgtagagttttggttagagtggttttcgtcgtttgtgggtttgggtattaggttttagggtgcgtttggtggttttcggaggtgttgcggaatcgttttatataattaatatacggaatggtttttaaaaataatacgtataggtagttcggcgatgtggtttggattttatttaatttatcgagttagaatattcggggtaattagttttagggacgggtgaggttggggtgtttttgtagttttttttattcggtgtgtatattggtttaggagatttttgattcgtaaacgttggtgtgcgtacgtacgtttgtagtagggaggagtcgtcgggtttatttatttttattagggttatagggttagattttcggtcgttttattagtttttttggttttttatttattttggtttgtatgggtttttgggttgtattttgtttttaggtattgggagttgtagtaggttttggatttattggtttgattagtttttagagaggttattttgttagtgattggggttaattttatgttggtttatgggatttttatgatattattttggagttttaagggttttttttgagtagaggttatggggtttagtaaaggacgttaaggaggatagtagggagttagggtttttagtagttagtggggataggtaggtttttagaga

SEQ ID NO: 111 - DNA, 2346 bp, Artificial Sequence
  chemically treated genomic DNA (Homo sapiens)
tttttgggggtttgtttgtttttattggttgttgagagttttggttttttgttgttttttttggcgttttttgttgggttttatggtttttgtttagagaggatttttggggttttaaggtggtgttataagggttttataagttaatatggggttggttttagttattggtagggtggtttttttgggagttggttagattagtgggtttagagtttgttgtagtttttagtgtttgagaatagggtgtagtttaggggtttatgtaggttagagtgggtgaagggttaagggggttggtggggcggtcgggggtttggttttgtggttttggtggaggtgagtgggttcggcggtttttttttgttgtaggcgtacgtacgtatattagcgtttacggattaggggttttttgagttagtgtgtatatcgagtggagggggttgtagaaatattttagttttattcgtttttggagttaattatttcgggtgttttgattcggtgagttggatggagtttaggttatatcgtcgagttgtttgtgcgtgttatttttggaagttatttcgtgtgttaattatgtagggcggtttcgtagtattttcggggattattaggcgtattttgagatttggtgtttaggtttataggcggcggaggttattttggttagggttttgtaaagttgtcggtggtatttagtgtatattggtttaaatttcgattaaatatttttttaaattaaaaagtgtaaatttagtttagttgattggcgagggtacgttttttttttttttttagtatttcgggttacgttttttttttcgggtgagttttttttttaacgtatttggagtataggtaggttatgagttttagcggcgtgtcggtttgtaggatgcgggttttttgtcggtcgttcgggtgtttgttgacgttgtagaagatgagcgaggaggattcgtttagggggttgaagtttagcgtgtcgtagggtgcggtcgcgatgtttacgattattgggagggtgtagggttttaggttttagcgtttcgcgtatatgatttgtcggagcgggatacgggcgtttggttattttgtttttcgttttagggttttttggtattggatttttaaattagggttttttttataattttatacggatagatttatagtatttaatagtgggaggttcgtttgaagttattgttttacggggtagagcggggttcggagtttatttgtttgtagatattttttgattaagttgaggaattgtattttggattttattttttttagttgtttttttagtttggatagtatggttttgacgtcggaatttgtgggtggagtagagtgggtgggggtcgggttgtttgtagttagggtttcggatttgtgtttataggggttttatttttgttttttttttttttttgtaagagtttttggtagaattttagggttttgcggtagttttttttttttattatgagttgttgttttagtttttggggacgaaatatagcgtttaagttttaggtagttttaatatacgttagttatatttagggttaggttttattttattggggtttttttggttttggagattagttgtagggtagggttttatggagatagaggtttatttagttagcgaggttagtttcggtttgggtagtgtggtttggggggttttgggttgtttttaggtttatagggtagtgtttagtttggggtcgattgttttttgcgttttttatttatagttaggtttttgtgggggatgtttaggggaattaggttttattaagttagtattaggtttttttgtttaagtaggtagggttgtgttatttttgggtttttaagtgtatattgtgggcggggttgggggtagggggtggtagcgggatttttttaacgtgtatttcgtgtgtttttaggtgtttgtttttttattttttattttttaatttagttattatttttgagatggggttttttttttgttgtttaggttggagtgtaatggtattattttagtttattataatttttgttttttaggtttaagcgatttttttgttttagtttttcgagtagttgggattataggtatgtattattatgttcggttaattttgtatttttggtagagatggggtttttttatgttggttaggttggttttgaattttcgattttaggtgatttgttcgtttcggttttttagagtgtcgggattataggtgtgagttattacgtttggtcgttttttatttttattgattttttaattttattttattttttattttttgagatgaggtt

SEQ ID NO: 112 - DNA, 2196 bp, Artificial Sequence
  chemically treated genomic DNA (Homo sapiens)
tttttttttttttttttttttttattagttatattggtttatttagaattttataaattaattttgtttatttttaattttttaatattgtttttgagattgttttattagaaaagtttttttttttatttatttcgtttaataatttttatttattttaatttttttgtatttattgtttttaggaatttggtatttaggatatttttgtttttatattgtttatgtatgtatatttcgtttttaataaaatatttagttgtttaagggtaagggttttatagagttttaatatgttaacggtttggtgttgtttaataatttagattttgacgggttttttttagggaggggagtaaagggtaaattattttaggggttgggagtgtagaagttaaatttttgagattgtgaaaagaagacggcgtcgagacgatttagtagtaggtatttaagtaagaaaaatttaaatattgtttttaataatgtttgattaatgttaaatattaagtaagggtttaggtagttttgatagtttgtagtgttttaggataaaattaattttgaggggtgttagtttacgataattttttgttagggttttggatacgttttgttttttcgaaggttaacgggttgtttttgcgcgtcgaggtttcgtttcgcggttcgtcgattggttttagtcgtttcggcgttaagatttaattttatattacgcgtttaggttacgtttatttgttatgcggttttggaaattgtgagtttggggattgttgtgtttattaatcggatttagaagggatttttttgttcggttggttttcggtttttttgtttattttcggataaattacggggtttttcgcgtcgtttatggcgtttttcgttcgtttcgagcgtttttttttttttcggcgtttttttgggttgtttttggcggttttggtgttgttgttgtttttttttttcggtaggatttcggggtggattcgcgcgttcgcggcgaggttagagttttgtttagttagtcgggtaggaggcgcggggcgaagtttattgtacgtcgtgtttgtttgggatagagagcgaggttagggtttttcgaggggtgtcgtgtttagatttcgggggtatgtggcgggggatgcgggaattacgtagaagtttgtttggtggtatcgtgtgcgcggtcgatatttacgtaggatttggttgcgtttttaaaagaagcgtgaatcgtgttttcgggattgagtttagttagtaaggggagggtttattgggcgttttaggtgagggtttgttttggagtgtataggtgcgtgggattgttgttagagttcgtgttgtgttcgtggtgagagtttgttttgtgtttttttggtgttttggtgagtagggtgtttattagggtttggatagtattcgcggtaagggttgtagtgcgtttgttgtgttttatgggttgggttggtttgggttgggttgggcgagtaggggtttggttaggtgttgttgggagcgtgttgtgcgtaagtggtttgtgtgcggagtttattgtgggtaagatagtttattgtttgttttgagtggagcgagcgcggattttgcggttagggagggtatgttgagtgagagtaggtttttagtgtttggggttagagaggtggtaagggcgtattatgtttttagtgttttttgtgaatagtgttcgtgttgtttgagatcgtattggttttgaattttaagtggttgtttttttggggggtgggtgggttatcgagttatttttttgtttttaattaatatagatagtatttgattttattgtttagtggttttttgatattgttttttttttttttattagtttgagttatatttgagagatgtgaagtaatttaaaaaatattggtagttaaatttagtgagaaattagtattttaataaaggaaggtagataatgttaattttgtttttttttatagtttataaattgaagtttaaggtttattttattgttttgtattttattgaatggaattaatatttttaaaaatgtatgttaggttaggtttagttgtttatatttgtgattttagtattttgggaggtttaagttgggtgattgtttaagtttaggagtttaagattagtttggataatatgttaaaattttatgtttataaaaaa

SEQ ID NO: 113 - DNA, 2196 bp, Artificial Sequence
  chemically treated genomic DNA (Homo sapiens)
ttttttgtagatatggggttttgatatgttgtttaggttgattttgaatttttgggtttaagtaattatttaatttgggttttttaaagtgttgggattataggtgtgagtaattgggtttggtttagtatgtatttttaaaaatattgattttatttaatgaaatataaaatagtgggataggttttaagttttagtttatgagttgtaggggaaaataagattaatattatttgtttttttttgttaggatattaattttttattaggtttggttattagtgttttttaggttgttttatattttttaaatatgatttaaattaatgaaaagaaggaaaataatgttaaaaagttattaggtaatggaattagatattgtttatattggttgggaataggaagatgattcgatggtttatttattttttaaaaaagtagttatttaaaatttaagattaatacgattttaggtaatacggatattgtttatagaaggtattaaaagtatggtgcgtttttattatttttttaattttaggtattgagagtttgtttttatttaatatgttttttttagtcgtagagttcgcgttcgttttatttaaagtaaatagtgagttgttttgtttatagtgaatttcgtatataggttatttgcgtatagtacgtttttagtaatatttggttaggtttttgttcgtttagtttagtttaggttagtttagtttatggggtatagtagacgtattgtaatttttatcgcgggtattgtttaagttttaatgaatattttatttattaaggtattaagggaatatagggtaaatttttattacgggtatagtacgggttttagtaataattttacgtatttgtgtattttagagtaagtttttatttggggcgtttagtaagttttttttttgttgattgggtttaatttcgaaaatacgatttacgttttttttgggaacgtagttagattttgcgtaaatgtcggtcgcgtatacgatgttattaaataagtttttgcgtggttttcgtatttttcgttatatattttcgggatttgagtacggtatttttcggagaattttggtttcgttttttattttaagtaggtacgacgtgtagtgagtttcgtttcgcgttttttgttcgattgattgagtagagttttagtttcgtcgcggacgcgcgaatttatttcggggttttatcggagaaggaggatagtagtaatattagggtcgttagaagtaatttaggaaagcgtcgggaaggaaagggacgttcgagacggacgggaggcgttatgagcggcgcgggagatttcgtgatttattcggaggtgagtagagaaatcgaaagttagtcgagtagggaagttttttttgagttcggttagtggatataataatttttaaatttatagtttttagggtcgtatgataggtgggcgtggtttgggcgcgtagtgtgaaattgagttttagcgtcggggcggttggggttaatcggcgggtcgcggggcggggtttcggcgcgtaggggtagttcgttggttttcgaggagatagggcgtgtttagagttttggtagggggttatcgtgggttagtattttttagggttagttttattttggggtattgtaggttgttaggattgtttgggtttttatttggtatttggtattagttaggtattattgggaataatatttgagttttttttgtttgaatgtttgttattgaatcgtttcggcgtcgttttttttttatagttttaaaggtttggtttttgtatttttagtttttaagataatttgttttttgtttttttttttggagaggattcgttagaatttaaattattaagtaatattaggtcgttagtatattgagattttatgggatttttgtttttgagtaattaaatgttttattgaagacgaaatatatatgtatgaataatgtaaggataagggtgttttaagtgttaaatttttggaagtaataaatgtaggaggattgggatgggtagaaattgttaggcgaagtggataagggggagaatttttttggtgaaataattttaggaataatgttggaaaattaagaatgagtaggattgatttgtagggttttgagtaagttagtatgattggtaaaagggggaaaaaaaaagggaa

SEQ ID NO: 114 - DNA, 2355 bp, Artificial Sequence
  chemically treated genomic DNA (Homo sapiens)
gtagaaaattcgggtattagtagtaagattcgggagatatttaatcggaaagaaataaaaaattattagtttttcgaagttatttttattttgaacgttgttcgttaagagaattatttattaaagtttttttgtagtagtttttataaaagttttattttatttagtaagaaagcgtttcgttttaaatttaaataaattttatatagatgaggtttcggaaattattagtttgattttttatgaagatagttagaggtggataaattaatagattcgttgaaatatttattttttgtaaataggtttgagaattaattaattagaagtggataaaaagtagggattttagaaagatgatttgatatattttattgattttttttggaatgcgatttttaattttttattaagagtttaaaatggttattagttaggatgggtttgggtgaggaatcgaattataatttattttaattttcgatttggtcgtttgttgttattaggagaaatggggtagagagggagggtatcgtttacggagttttatttcgtatgtttcgattttttttcggcgtttttttatttcgtttttattttgatcgttcgcgagggagacgtcggtcgatggattcgtatttgtttttatttttcgtttttttcgggcgatttttttatagtttcggattttcgagaaaggggaagggagacgtgtgtatacgggggttttcgggatcgcggttttgtagttgtcgtttcggtttttagcgttggtcggcgattcgaggcgcggttcgtatttatttgtagtttcgtttttcggtggcggtaatatttagcgatgtttttgtagtttttgcgggtcggcgttagttttatcgttttcgtatcgtttttaagatgttaattcgtcgttattatttaggggtatagggaatcgaagtttggtgttgtgtgatcgtggagggcggcgtgtgagtgtggttttgagcgtgcgagtgtgcgcgcgcgtgtgtggatgtgttttttttttcgatggtaaagacggtttaggaatttgatatttaagttggaatttttttgaagcgggtgaaggtgagtttgattttttttttcgtttttttattttatagtgttaaagtaattaaaagatttgtttattgaggaaaagttaaagtttcgtagtttttggtagcgttcgcggtcgttttttgttttcgtcggatgcgcgcggtgcgtttagttttttggattgtaagaattaaggcggttttgttgtaattatcgtttttattttatttttgatttgtttgtttttaaggtcgattaaagattttttttttcgttttacgtcgttttttttttttatatatatatatatttatatatttttcgttttttttttttcgtttttttttttgttttttggggaaaggtaattggatagaatgatttatttttaggaaagtagtttcggttacgtatttttcgagttttttggttttcgtaggtatcgggtttttaacgtggcggagttgttgggaagttcgggataggaaggaggagaggttttgagtttagtcgatgttttttttttagacgttcgcgttttttcgtttaggtgtttttgtttttattgttcgtagataggttttcgttggtgttttcgcggagatttggcgttttttattcgaatttatttagtagtaatttttggttagttttagttttttaatttcgtttcgaagtgttgcgggtagagttttacgtagtttattcgttgtttttttaggtatcgtgggttggaaggaagggaaattcgtcgatgtttttttggtagtagtgttttggtatcgttattatcgaggaggtgcgagttttaatatcgaatataagcgagtaggtgtcgtttgtgttattttgttaaaggcgggaggggagaaagaaaggagcggggggagggggtcgaggaaataaatttagattatcggcggagaaagaagtcgtttagtaagtaaagtttttttttcgcgttttattttagatgttatattgttaaaagatattgatgttaattttttagaaagtcgttataaagggtagagtttttgttttattttagaattttattttatttagtttggttgtttagtgagtatagagtgatttggttttttcgtatagtgtagcgagaatgtaggagaataggttttgatattttaggttgagttaagtagtaaaatggaatggtagggtcgggcggcgttgtttcgttttttttttttaatagttagttttgttagttttagtaattgtcgttgagagtaaataacggttttgtagaaaaagaacgag

SEQ ID NO: 115 - DNA, 2355 bp, Artificial Sequence
  chemically treated genomic DNA (Homo sapiens)
ttcgttttttttttgtaggatcgttgtttgtttttaacggtagttgttggggttaatagaattggttgttgggagagagaggcgaggtaacgtcgttcggttttgttattttattttattgtttaatttaatttggagtgttaggatttatttttttgtattttcgttgtattatacgggggagttaagttattttgtatttattggatagttaggttgggtggaatagggttttagagtggagtaggggttttgttttttatggcgattttttaaaagattagtattagtgttttttgatagtatagtatttggggtgggacgcggagaggaggttttgtttgttaaacggttttttttttcgtcggtgatttggatttgttttttcggtttttttttttcgttttttttttttttttttttcgtttttagtaaagtgatataggcgatatttgttcgtttgtgttcgatgttggaattcgtattttttcggtggtgacggtgttagggtattgttattagggggatatcggcgggttttttttttttttagtttacgatgtttagaagggtagcgggtgggttgcgtggggttttgttcgtagtatttcgaggcgggattgaggggttgaagttggttaggagttgttgttaagtggattcgagtggaaggcgttaagttttcgcgagggtattagcggggatttatttgcgagtagtgggaataggggtatttggacggaggaacgcgggcgtttggaggggggatatcggttgagtttagagtttttttttttttttgtttcgagttttttagtaatttcgttacgttggagattcggtatttgcgagagttagggaattcgagaagtgcgtggtcgaggttgtttttttgaaggtgaattattttgtttaattgtttttttttagagaataagagggagggcgggagagagggaacggaggatgtgtgagtgtgtgtgtgtgtgagagggagagacgacgtgaggcgagaggaaaagtttttagtcggttttaaaagtaaataaattagagatggaataagagcggtaattgtagtaagatcgttttgatttttgtagtttagggagttgagcgtatcgcgcgtattcggcgaggataggaggcgatcgcgggcgttgttaagggttgcgggattttggtttttttttagtaaataaattttttgattattttgatattgtggaataaagaagcggggagaaggattaggtttatttttattcgttttagggggattttagtttggatgttagatttttgaatcgtttttgttatcggaggaggaaatatatttatatacgcgcgcgtatattcgtacgtttagggttatatttatacgtcgttttttacgattatatagtattagatttcggttttttatgtttttggatggtgacggcggattggtattttggaagcgatgcgagagcgataaggttggcgtcggttcgtaaaagttgtaggagtatcgttaggtgttgtcgttatcgggaagcggggttgtaggtaggtgcgagtcgcgtttcgggtcgtcggttagcgttggggatcggagcggtaattgtaggatcgcggtttcggaagttttcgtgtgtatacgtttttttttttttttttcgggggttcgggattgtagagggatcgttcggggaaggcgagaggtgagggtagatgcgggtttatcggtcggcgtttttttcgcgggcggttagggtaggggcggagtagagggacgtcgagaggggatcggagtatgcgaaatgaggtttcgtgagcggtgttttttttttttgttttattttttttaataatagtaaacgattaggtcgaggattgaagtgggttgtaattcgattttttatttagatttattttggttggtaattattttggatttttaataaggagttgggggtcgtattttagggaagattaatgggatgtgttaggttatttttttgaaatttttattttttgtttatttttgattagttaatttttaggtttgtttgtagaaggtgggtgttttagcgagtttattgatttatttatttttaattatttttataaagaattaagttgataattttcggagttttatttatgtaaggtttatttagatttgggacggggcgtttttttattgaatgaaataaagtttttgtaaaggttattataagagagttttagtaaatgatttttttaacgaatagcgtttagaataagaatggtttcgggaaattaatggttttttattttttttcggttagatgtttttcggattttgttattagtattcgggttttttgt

SEQ ID NO: 116 - DNA, 3404 bp, Artificial Sequence
  chemically treated genomic DNA (Homo sapiens)
ggttcgagaacgtttaatcggaagtcgtttttaagtgattcgtgcgttttttttttgttcggttcgttttttggttaaatttttaaaagagcgcgtattttttttcgttcggagtagagtgtcgatttttttttgcgttcgcggaggcgtagtttttcggtttattcggacgttgggggttaggtttaggattttagggtttcgcgtttcggagttttgtgggttaataggtgatgggagaggggttagattgggggcgcgttttgatagatttaggtaacgatcgcgcgggtaaaggttggcgtttcggggttggggcggggtcgtcggaggggcggggcgggggttgttagacgggcgcgttagtcgcgttaagtatttattacgtttttgttagatttgggtattttagggagtcggtggcgttttcgttcgagaaggagtcgggaagaggagagtggttttcgggaagaggagagtggttttcgggaagtattttttttgaggaagaggcggcggcggcggcggtatttacggagagaaaaagtaagtagttgtattttgtttttaagcgttagattttgatacgcgttttttgtagcgatgataattgattaattcgagagaacgtgtataaggaaagtgagggaagggggttttttatttttttttagttatttttaaatgttttaggaggttcggtatttgttttaagcggtttttagcgttagtttttgggtattgcgggtcgtttcggggtttgtgaatttttagaacgttagtttttggtcgtcgttgcgttttagaggcgtcgtcgtttagaagtcgggcgtattcgtcgttcgttagttatagattattatttttttttttattattttcgcgttttttatatattatatttttgtatttaaagaatttaggtttttagaattagaattttttttacgtagtttgtatttagaagagtaaagagaattagatattttggttgtaggaatttttttttttagtgatgtagttatttatagtttaaattttagttcgagtttgcgtgtgttcgcgcgcggggtttcgtcgcggcggtgtaaattttttttttggttcgttattttagaggaattatagtatgttagggttgaaggtttttgatcgttaacgttaggggagtagaaatgtggttttggaggggatgagcgtgcgtttttagtagatgttcgtttttttgtaaacgcgtaatcgttagtttggaggtacggggttttttgaatgggtttagtatttatataggttgtagatgtggaaagtggggttagaaggttaggttgaaagaaggattagaatttggcgtcgggtttgaggggggtttgagcgaattaagaggagtgtacgatgagaataaagaaaaggtgtattaagtttttagaaatagatgaattaaggatttatatgtaagtttttttaatatttcgttcgataattattatgatttaaattttataatagatttttttttttttatatattaggaataagtaattattttttttttgtttttaatagatcgaaaaatgaaatttagatatatagtttgaaagattaggggggcgacgggatgaggggggttggggatgggattgtgatattgtttaaaagtaagagatttttattgatagggtttatttttttttagttttaattataggtatcgaaaggtattttattttttgttaaaggtttaaagaaggaaaatataattatatataggcgtatttgtaatagtttgttaaataaaatttgtttttttttattagaattaatttttagggtttaggtttttggtaaggattgggtattcggattttttaattgttgtattatggggtaaataattggggattttgagtcgtttaggcggtatttttataaattgtatagttttagttcgttttttgtttttacggttcgattaagttcgttgggttgtcgttgtttttatgatcgttgggttcgacgcgtagcgcgcgttgaatggagatattttcggttttcgggtcgcgcgtcgtacgtcgcgttttattttcgcggcgttattgtttcgtgttggcggtcgagcgttaatcgtaggatcgcgtcgtcgttttcgacgtagtgagtattttattagtaattcgagtttttcgagtttatcgaagtttcggtttttttgggaaggtttcgggttttcgttattcgtcggcgggttggcggagacggtaggggttgtattttttagtttttaatttaattttggtcgtagtttttatagaaggcgaataaggagataaggaagatcgagttagagagagatgtgattcgtttgaggtattaagaaataagttcgtcggtagtttttttaattttattttattttcgttgttgtttacgttttttagattgttcgcgttagaaatttcgtattcgtcggatggacggtttcgggtatagggttgtaggcggttcggaatagttttggttcgcgttcgttggttcgttaggagcggttttagcggtgagggggcggggagtcggcgggggagggtcgttcggcgtcggaggcgcggtcggtagcgtcgcggacgagttggtttgtgtaggtagatatttaaataaataagttagaataaattttgtttttttattattttattttttttcgtagtttgcgttttttttgtgtgtgtaaagcggagtagttagatgtagtataaaataatttatgaagggtatcgagtttgaaaaattatggtgtatgagtaggttttattttaggttttagttattttgagtcgtggatttttaaatgttgtttgtttcgaagtagtttttgttttattgtgttttttgtatcgattttttttttcggttttcgatcggttgttttacgtttagttttttttaattttttttttatttttgttcgttcgtatcgtgtttgttgtttgtaagttttcgattgtagatcggtcgtttgttttatattttaataatattaattagggggggagggggcggggtttcgagttgagagttttcgttattcgggttgagtggtaggtatagtcggtttgttaggaggcgatttttagggttaaggggcgggtttcggcgaaatggtcgtttcggttacgggggcggggttcgaggtaggagttaatcggtgtcgagcggagttaggttgttggtttaggattttttttaggttttgagttcgcgttggatgtttagaggagaacgaggatggtagtcgaggtgtgtgttgttttggacgttttgtttttagtaatcgtagttttcgcgtagtagaataaattcgagaataacgtttttaatttatatttttttttatagttgtatttcgcgcg

SEQ ID NO: 117 - DNA, 3404 bp, Artificial Sequence
  chemically treated genomic DNA (Homo sapiens)
cgcgcggagtatagttatagaaaagagtgtaagttgggagcgttattttcggatttattttgttacgcgaaagttgcggttgttaaaagtagagcgtttaaagtagtatatatttcggttattattttcgtttttttttgaatatttagcgcgagtttagaatttggagggaattttggattagtaatttgatttcgttcggtatcgattggtttttgtttcggatttcgttttcgtggtcggggcggttatttcgtcgggattcgttttttggttttgggaatcgttttttggtaggtcggttgtgtttgttatttagttcgagtggcggaggtttttagttcggagtttcgttttttttttttttaattgatattattggagtgtggagtaagcggtcggtttgtagtcggagatttgtaggtagtaaatacggtgcgagcgaataggagtgggggggaaattaaaaaaagttaaacgtggagtagtcgatcggggatcgagaaggggaatcgatgtaaggagtataataaaataaaagttatttcggaataaatagtatttaaaaatttacgatttaagataattgaaatttaaaataaaatttgtttatgtattatggttttttaaattcggtattttttatggattattttatgttatatttggttgtttcgttttgtatatataggggaggcgtaggttgcgaaggaaggtaaggtgatgggaaagtaaagtttgttttgatttatttatttagatgtttatttgtataagttagttcgttcgcggcgttgtcggtcgcgttttcggcgtcgggcgattttttttcgtcggtttttcgtttttttatcgttgaggtcgtttttggcggattagcgagcgcgaattagggttgtttcgagtcgtttatagttttgtgttcggagtcgtttattcgacgggtgcgggatttttggcgcgggtagtttggagggcgtgagtagtaacgggggtggggtggggttggaggaattgtcggcgagtttattttttagtattttaggcgggttatatttttttttagttcggttttttttgtttttttattcgttttttgtgggagttgcggttagagttgggttggagattgggaaatgtagtttttatcgttttcgttagttcgtcggcgagtggcgggagttcggagtttttttagagggatcgagatttcgatgagttcggaaagttcgggttattaatgaagtgtttattgcgtcggaggcggcggcgcggttttgcggttggcgttcggtcgttagtacggaataataacgtcgcggaggtgaagcgcggcgtgcggcgcgcgattcgagggtcggggatgtttttatttagcgcgcgttgcgcgtcgggtttagcggttatgggggtagcggtagtttagcgggtttggtcgggtcgtggaggtagggggcgggttggagttgtgtaatttgtaaggatgtcgtttgggcgatttaaagtttttaattatttgttttatagtgtagtaattgaggaattcgagtgtttaatttttgttaaagatttgaattttgagggttggttttggtaggagaaggtaggttttatttggtaagttgttatagatacgtttgtatatggttatgttttttttttttgaatttttgatagaaggtaaaatatttttcggtgtttgtagttggagttggggaaaaataaattttgttaatggaagttttttgtttttgagtagtgttataattttatttttaattttttttatttcgtcgtttttttggttttttaggttgtgtatttaagttttatttttcgatttgttaaaagtagaagagaaataattatttatttttgatgtgtagagggagaggaatttgttatgaaatttaggttatggtggttatcgggcggggtgttgaggggatttatatataggtttttgatttatttatttttgaaaatttagtgtattttttttttatttttatcgtgtattttttttagttcgtttaagttttttttaaattcggcgttaaattttagttttttttttagtttgattttttgattttattttttatatttgtaatttgtatagatgttgaatttatttagagaatttcgtgtttttaagttggcggttacgcgtttgtagaaggacggatatttgttagaaacgtacgtttattttttttaaaattatatttttatttttttgacgttagcgattagaaatttttagttttggtatattgtgatttttttggaatagcggattagaggaaaagtttgtatcgtcgcggcgaaatttcgcgcgcgaatatacgtagattcgggttggagtttgggttataaataattgtattattagggggagaggtttttgtagttagaatgtttagttttttttgtttttttgggtgtaagttacgtgaagaggattttgattttaagagtttgaattttttagatgtagaagtgtgatgtataaaaggcgcgggggtgatgggagggagggtggtgatttgtggttggcgggcggcgagtgcgttcggtttttaggcggcgacgtttttagggcgtagcggcgattaagagttggcgttttaggagtttataagtttcgaggcggttcgtagtatttaagggttagcgttgggaatcgtttgaagtaggtgtcgggttttttggggtatttgggggtggttagaggaagataagaaattttttttttttattttttttgtgtacgttttttcgggttggttagttattatcgttatagggagcgcgtgttagagtttgacgtttgaaggtaaagtgtagttgtttatttttttttttcgtaaatgtcgtcgtcgtcgtcgttttttttttagaggagatgtttttcgaaagttattttttttttttcgaaagttattttttttttttcgattttttttcgagcgagggcgttatcggttttttggagtgtttaggtttggtagaggcgtaatggatgtttggcgcggttggcgcgttcgtttggtagttttcgtttcgttttttcgacggtttcgttttagtttcgggacgttagtttttgttcgcgcggtcgttgtttgggtttgttagggcgcgtttttagtttagttttttttttattatttgttggtttataggatttcggggcgcggagttttggagttttaggtttggtttttagcgttcgggtgagtcgagggattgcgttttcgcgggcgtaaagggaggtcggtattttgtttcgagcgggaagggatacgcgtttttttgagggtttaattagagagcggatcgagtagaagagagacgtacggattatttgagagcggttttcgattaaacgttttcgggtt

SEQ ID NO: 118 - DNA, 2475 bp, Artificial Sequence
  chemically treated genomic DNA (Homo sapiens)
gttataaaaaggttaatagataagtattttttaagtaataaagttttttttattatatgttataggagttattgagtgtttttgtaaagaaaattagtattataaagtagtaaattataagtgatgtaaatattattttttgtagaaatttataggaagggaagttaggtagaggtatgtttttatgttagtaggtggggatataaattttttttttgttatttttttagaagaaagttagtaatagagattaagagtgtaaaaaaaaaagaaaagaaaaaagaaaaaaaaaattattttgatttaataattttatttttaagaatgtatttttaggaaaaaaaattagatatttgtttaaggatttttgttgaattttttttataaggttattatattattaaatagaaataattgaaatagttaagttgggttatattatgggatatgtttatgatggtattatatttaagtgatgtttttgaagtatggtagtgatttttggaaaaggtttaatatattattttaatgagatgtgtaaatttattattatgatatattaggagaaatgttttgatagatgaagtgggaataattgggagagtgaatgatggagtgttaggaataggggtatatgagttgggttttttaggttgtggaggtgtttttgggtggaagagaaggagggattaagtggagagttttaagttttgaagataattgggaaggtaatatattttttaagaagggtatgtagtagttatattttttatttgttatggttagtaaatttattgtgttttttggagtgagttgggttattaagatgggtggtgtttttttgttggggaagaggggtttggtgggaatttttgttttaaggtttggtagtaatgtttttatgttgttttgggttgtaggtttgttaagttttttgtttttgtttttttgtgtgtgaaataagttttagggttaatgtggtttttttatttagtgtttttgggggtgttaaaaaatgatttgtttagatttttagtgttgatgttgtgtataagtgtagttaattgttggatttggttggtgtgaagttttatatttaaaaggatgaagggtatttatttggtttaagagaatgatttttaggtaaagggttagatttaggtgaggagttggtatagggttagaggtgttttgtatatttagagttttttttttgagttttttgttttgtttggtttttttgggttgtaggtgtttattttgttttttggggttttgttgttttttttttgttaggttttttttatagtaatgtttttttttttttttttttagtttttgagtttttttttttttttttttattgttttatttttgagggatagaagtggggtggtttgagagtaggagattggagggaagaagtaagtttaggtttagttgtaagtattttttatttttgtttttgtttttgtttttgtttttgttaggttttaggatatttgatttttgttaggttttatatggtttggtttgaagtgttttttttttaatagttgtggattggtgaggtttaatggtttatgtttgtaattttaggattttgggaggttgaggtgggtggattatttgaggttaggagtttaagaatagtttgattaatatggtgaaattttgtttttattaaaaatatagaaaattagttgggtgtggtggtgtgtatttgtaattttagttatttgggaggttgaggtaggaaaattgtttgtatttaggaggtggaggttgtagtgagttgagattgtgttattatattttagtttgggtaataagagtaaaaaattttgttaaaaaaaaaaaaaagaagaagaagttgtggagttgtttgatttttgattttgtttgtttaggttggggttgttttggttttttaaatttagtagtgagtttggatagatttagaggtgtttattttaggtaataggagttttagataaaattaggttttttttttggtttagatttttttttgtttataatatttttaggatgtgggatatttagaggtttgtgtagttggaggatgttgggaaatgtgaggagaagatgttttttttttaaaattggaatttttttgattatttgaatttttttgttagttataaattttatttatttttattttatttttgtttttttgttattgtttatttgtttaatttttgaaggtagtgagttttttgttattggaagtgtattttttggtatttttatttgtagaagtttttatagatgttgttttttttttggtttagattatgtttattgtgaaggaagtagtatattggttgtttaaaagtgagatgagtttttatgtagtgttggattttaagaagggtgttttatttgaagattttaaaaaattttataggtttagattttagttttttattgatttttggaatttttttttta

SEQ ID NO: 119 - DNA, 2475 bp, Artificial Sequence
  chemically treated genomic DNA (Homo sapiens)
taagggggaaattttaaggattaataaagggttgaggtttgaatttgtaggattttttgaagtttttaggtgaggtgttttttttaagatttagtattgtatagaggtttattttatttttggatagttggtgtgttgttttttttatagtagatatgatttgagttagaggagaagtagtatttgtgagaatttttataagtaagggtattgagaagtgtatttttagtgataggaaatttattatttttagggattaggtaggtaaatgatgatagaaggataaggataagataagagtgagtgggatttgtggttagtaggagaatttaggtgattagaaagattttaattttaaggaggaaatattttttttttatattttttagtattttttagttatatagatttttagatattttatattttagaggtgttgtaagtagggagaggtttaagttaggaaaagagtttgattttgtttagagtttttattatttggagtaaatatttttgggtttgtttaagtttattgttgggtttgaaagattagggtggttttagtttgaatggataggattaggaattagatagttttataattttttttttttttttttttttttgatggagttttttgtttttgttgtttaggttgaagtgtaatggtgtgattttggtttattgtaatttttattttttgggtgtaagtgatttttttgttttagttttttgagtagttgagattataggtgtatgttattatgtttggttaattttttgtgtttttagtagagatagagttttattatgttggttaggttgtttttgaatttttgattttaggtgatttatttattttggttttttaaagttttgagattataggtgtgagttattgagttttgttgatttatagttattaagagagaaatattttagattaaattgtgtgaggtttaatagaagttaagtgttttagagtttggtgggggtgggggtgggggtgggggtgggggtggggagtgtttgtagttaggtttggatttgttttttttttttagttttttgtttttaaattattttatttttgttttttagaggtgggatagtggggagaggaggaagaggatttagaggttggagaaggaagagaaaaggtgttgttgtgggaaagatttggtaaggaaaaggtagtggaattttagagagtagggtagatgtttgtggtttaggagaattgagtaaggtaaggagtttaaagggagagttttgagtgtgtagggtatttttggttttgtgttgattttttatttgggtttggttttttatttgggagttgtttttttaagttaggtgggtgttttttatttttttgggtgtgaaattttatattggttgggtttagtagttgattgtgtttgtgtgtagtgttgatgttgagggtttgggtaggttgttttttggtgtttttggaagtattgggtggggaggttatattggttttgggatttattttgtgtgtagggaagtgagagtggagggtttagtaggtttgtggtttaaggtagtgtaggagtgttgttgttaggttttggggtagggatttttattgagttttttttttttagtaggagggtattatttattttgatggtttaatttattttaggaaatataatgggtttgttgattgtggtggatgagaggtatggttgttgtatgttttttttaagaggtgtgttatttttttagttgtttttaggatttagggttttttgtttggttttttttttttttttatttggaaatatttttataatttggaagatttaatttatatgtttttgtttttgatattttattatttatttttttagttgtttttattttgtttgttaaagtattttttttagtatattgtaatgatgagtttgtatgttttattaaaatgatgtattgagttttttttaaaagttattattgtgttttaaaaatgttatttaaatatgatgttattatgagtatgttttataatgtaatttaatttggttgttttagttgtttttatttgataatataataattttataaggaaaatttaatagaaatttttgaataaatgtttaatttttttttttaaggatatatttttagaagtggaattattgggttgaaatgatttttttttttttttttttttttttttttttttatgtttttgatttttattgttaatttttttttggaaaggtagtagaaggaggatttgtatttttatttgttggtatgggagtatgtttttatttggtttttttttttgtgagtttttataggaggtagtgtttgtattatttataatttattattttgtagtgttggttttttttgtaagagtatttaatggtttttgtaatatgtagtagaaaaagttttgttatttggaaaatgtttatttgttaatttttttgtagt

SEQ ID NO: 120 - DNA, 2229 bp, Artificial Sequence
  chemically treated genomic DNA (Homo sapiens)
tttttttttggtgttggttggtgtgggttggggttaggtggagaagttgttttttgttaaggtgatagaatgtgttgggggtgggggttggggttagggttggtgtaattagggggttgttgtttttttttggatatagtggaagttttttttgtattattaaatttttgttattttttttgagggatttgtttttaggtagtatgtaagttgttgttttgggtttattttgtatttttttattgggtgaggaaggagtattttgaatggagatgggggtgtttttggtttatatatttgtagagaagaggtgtgttgggttgtatttttggaggttgtggtaattgatattagagaagattttggttgtagttgggaaggtttattggttggaaagaggtgttttttttttttagtaaagggttttgtttggaagggttgttttttatttgtttagtggtattataggatggttggtttttatttgaatttttttggatggtattattatatagttgggtttttgtagtgttggttttttaatttgatgattgttattttggtgaggatttgtgttgatggttggagaattttgtgttgtgggtgtatatggttaggtggtgtttggtaggtgatgtttgggtgtaggatggtgtttttattgttttattttaaattgttgtttgggtttaggttttttggttttttgaataggggtttggggggttaaggatgttgaggttttgggggtaggaagttttttttggttaagtgtttttttttttttttggtatatatttttttatttatttattttgtttatttttggggtgagaggtttattaaggtagggtgtgttttttttatgaattattttaaggtttttgagttgtgggggttttgggtaattatttttttttttttttggttttaggtattttagtttaggggtttgtagagaagtttgaagtttggataaatgtgttggatgttaataattttttatttttggtagtagtaaaggttaatatatttttattttttattttagtttgttattaaaataaagttgtgtgtggttgagggtaggaaggtgttgagattgagaagaagggatgttttggagaaagtgtgtttagttgattttagaaattagagttttttgggattttgttgagattttttgtagggtgttttaatttgtttttttattgtgtgttggtgttgtagtgtgtgtggtttagggtttggtgattttggtttagtttggtggttgtggtgaggtttttggtgtagttgtttggaattttgtattagaattgggattgtgtaaatgttttggttgaagtgttattttatttaagaaatattgttgttaggaataaaatggggtttttggtgttttgaagtattttttgaaatttttttaaaataatttataaaaaatgtttttgttttaatgttttataatgtttaaggaaatatgtaaatggtttgtttttttattgagatggttgttttaattaatagtgtatatatatataataatttttttaatttttttttttagagttaagtattttattatatgtaaattataataaagaaaagattgtgtaagattatgtaagttgattgatttaaaatattgagttttaatttaggttttttgtttttttatttaataatttttgtgtttggattagattggtgaagtaggttatggaaattaataaagtaaaaaattaaaagtatttttttttgttatttttttttttaaaattaaataatagttgtttttttttgagtaggttttagttttaggtttgagtttttttgtgattattttatagttatttatagtagttgttgttgtttttgttgggtttttgtttttgttttttttgggttgttttttgtatataaaatatattttagttttttaattaaatttaaatatgattttggtagaatttatatattttgtggtgtatggattgtgttggtgtaggggaaataaatattttttggtatttaattattgagtttaatttgaaaaattgggattgggtttttaggtggtattttaggggttttaatttggtttgtgtttttttagattttggtgttgagagtgttgtttttgtgggtgggtggatggagaggtaataatttgtttttaataaaaatttgttgttattgaattgaaagtgaaagggaagggagaag

SEQ ID NO: 121 - DNA, 2229 bp, Artificial Sequence
  chemically treated genomic DNA (Homo sapiens)
tttttttttttttttttgtttttgatttggtggtgataggtttttgttgaaagtagattgttatttttttgtttatttatttgtaaaagtagtgtttttagtgttaaggtttggggaggtgtgggttaggttggagtttttggggtgttgtttaggggtttagttttgattttttgaattagatttagtggttaaatattagagggtatttattttttttgtattgatataatttatgtattatgaaatgtgtaaattttgttggggttgtatttgaatttagttagagaattggggtgtgttttgtatataagagatgatttaaagaaggtagaaatgaaaatttgatagaagtagtaatagttgttgtgggtgattgtggggtgattgtaggaaaatttgagtttgggattgaagtttgtttaggaaggggtgattgttgtttaattttggagggagggatggtgaaggaagatgtttttaattttttattttgttaatttttatagtttgttttattagtttggtttaaatataaaagttgttaaatagaaaaatagagggtttggattaaaatttaatattttaagttaattgatttgtatgattttgtataattttttttttattataatttatatatagtgaagtgtttagttttgaggaggaaagttggaagaattgttatgtatgtgtatattgttagttaggatgattattttgataaagaaatagattatttatatgtttttttaaatgttgtaaaatgttaaagtaaaaatattttttgtaagttgttttaagaaaattttagaagatattttggagtattggggattttattttgtttttgatagtagtgttttttgaatagggtgatattttagttagggtatttgtgtggttttgattttaatgtgaagttttaagtggttgtgttaggaattttgttgtgattgttgggttaagttggagttattaagttttgagttgtatgtgttgtgatgttggtatgtagtaggaaaatagattaaaatgttttatagaaaattttggtgaagttttggaggattttggtttttaagattagttgggtgtattttttttgggatgttttttttttttggttttagtgtttttttgtttttagttgtgtgtagttttgttttggtggtaaattgaaataagaaatggaaatatattggtttttgttgttgttagggatgagaggttgttgatgtttggtgtgtttgtttgggttttgggtttttttgtagatttttggattggggtgtttgaggttaggagaggagggggatagttgtttggagtttttgtggtttagaggttttgggatgatttatggggggggtgtgttttgttttggtgagttttttgttttgagggtaggtgaggtgggtgggtaggggagtgtatgttggagagaagagagaatgtttaattagagagaattttttgtttttggagttttagtgtttttagttttttaaatttttgtttaggaagttgaaggatttaggtttaggtaatggtttggggtggggtggtaagagtgttgttttgtatttggatgttgtttgttaggtgttatttggttatgtgtgtttgtagtgtagggttttttggttattagtataggtttttattgaggtgatagttattggattgggaaattaatattgtgaggatttggttatgtgatgatattgtttgggggaatttgagtggaagttgattgttttgtggtgttattagataggtgagaagtagtttttttaaatagggttttttgttggaaggaggaggtatttttttttagttagtgagtttttttagttgtaattggggttttttttaatattagttattgtggtttttagaggtgtagtttggtatattttttttttgtagatgtataaattggggatatttttatttttatttaagatgttttttttttatttagtagaggggtgtggagtaaatttgggataataatttgtgtgttgtttggaagtaggttttttagaaaggatgataaaaatttggtgatgtggaagaagtttttattgtgtttaggaaagggtagtggttttttagttgtattggttttggttttggtttttatttttagtatgttttgttattttaataaagagtggtttttttatttgattttaatttgtattagttagtgttgaggaaaga

SEQ ID NO: 122 - DNA, 2475 bp, Artificial Sequence; identical to SEQ ID NO: 118
  chemically treated genomic DNA (Homo sapiens)

SEQ ID NO: 123 - DNA, 2475 bp, Artificial Sequence; identical to SEQ ID NO: 119
  chemically treated genomic DNA (Homo sapiens)

SEQ ID NO: 124 - DNA, 2345 bp, Artificial Sequence
  chemically treated genomic DNA (Homo sapiens)
gtgtttggttgttatttttttttaattttattggtgtttgtgggttgaagggttaggatggattagaggtgagtaattttggtggtattaggtattttttgatttgtttgggttgttagttgtatggattttgggtagatgtgtgtagtggttgtggtatagggtggggagtggttgtttggttttattttaaggtagtagaatgtttagagttggtttttggttttaggtgtaggttgagtagtagttgggtgggtagtggtgttgggtaggtttttttagttgggttgataggttgttttgatttagttattagattttgtttgtgttttggtagtgtggattttagggtaattttgttgtagtggttaagttgggggtggaattggtttatatttttgaattgagtaagtttaggagtaggtgtgttggtggtgttgtgaagtggtatttatgataggtaggttgggtgttgttattttgaaatttttgagggaggattagttagtttaggttggtgttggagttgtagtgttatttgtaggttaagaagtttttttttgggaggttggagttgtagtgttatttgtaggttaaggagtttttttttgggaggttggagttgtagtgtgatgtgtaggttaaggagtttttttttgggaggttggagttgtagttgtagtgaagttataggttttgtgatgttataggtgggtaggtgtattagtttgtaatggattggtttggttttatttgtgaggttttgtagtggttgtttggtttggtagtggttgtttggtttggtgtggtagtgattgtttggtttggtatttttggtttagtggttttttttttgtagattggaaattgtgggttattttgttgggaggttgtggttgaggtagtagtttgttattgatggttttttggggtggagaaaagtggggaggggttgaggggtttttgaagttggtagtttatgttatgaggaaaattggtagtgttaggagttaggaggattagtggtatttgggttatttgggggattagtggtttttgggttttttttatagttggtggaaaaatagtgttggtagtgagagtaagtatggtgagggtgttttagattagttttagtatgatgtttgtttggaagattttggtgagttttatagagttgtttggttgggtgatgtttttggggtggagtatgttttggtttttggagatattggtgtggataagagggataggaagaagaggtaatggttaggtgaaggatgtgggtgtgttgttttgttggggatattggttttttggtgtttgtaggttttatggtatttgggatggggaaatgttagaggggttaggggtttaggttttttagtgagatgggattaaatataaaggattattattattgtaaaagtgttggtttattttataggagttttttttaaaaatattgtattttttaattgtgtttatttatttttttaatttatttattaaatataagggttgggtgtggtggtttatgtttgtaatattagtattttgggaggttgaggtgggtggattatgaggttaggagattgagattatggtgaaattttgtttttattaaaaatataaaaaattagttgggtgtagtggtgggtgtttgtagttttagttatttgggaggttgaggtaggagaatggtgtgaatttagaaggtggagtttgtagtgagtggagattgtgttatagtatttttgtttgggtgatagaatgagattttgttttaaaaaaaaaaaaaaaaaaatataaattgaatatttattatatagtagatatattttattgttgtttaggttttttttatttttaagaattttatgttggttgggtttggtggtttatgtttgtaattttagtattttgggaggttgaggagggtagattatgaggttagaagtttgagattagtttgattgatatggtgaaattttgtatgttatgtttttgttttagtttagatttagttaaaatttttatgataaattattttttaggtttttggggtttagtttaaataatgttgtagaaagagatgagttttttttttttattgttattagatttgtatgttgaggattttttttttagattgtggaatgttttatattatttttttttagatttgtggtaggaagttattattagaattttgagttttaagtatgttagttggatttaatagagttaagttttatttatgatttatgaatatttatgtataaaatgagagttttggtagggtgtagtggtttatgtttgtaattttagtaatttgggaggtt

SEQ ID NO: 125 - DNA, 2345 bp, Artificial Sequence
  chemically treated genomic DNA (Homo sapiens)
agttttttaaattgttgggattataggtatgagttattgtattttgttaaagtttttattttatatatggatatttatgagttatggatgagatttagttttgttaaatttaattaatatgtttgagatttagaattttggtgatggttttttgttataaatttgggaaaggataatatgggatattttatgatttaagaaaagggtttttagtatatagatttggtagtaatgagaaaaggaaatttatttttttttgtaatattatttgaattgaattttgagggtttaaaggataatttgttatgaaggttttagttaagtttaggttgagataaaagtataatatgtggggttttattatgttggttaggttggttttgaatttttgattttgtgatttgttttttttggttttttaaagtgttgggattataggtatgagttattgagtttggttaatatgaagtttttaaggatggaaggaatttgagtgatagtagaatatgtttgttgtataataggtatttagtttatgtttttttttttttttttttgagatggagttttgttttgttgtttaggtgggagtgttgtggtgtgatttttgtttattgtaagttttgttttttgggtttatgttatttttttgttttagttttttgagtagttgggattataggtgtttgttattgtgtttggttaattttttgtatttttagtagagatggggttttattgtggttttgattttttgattttgtgatttgtttgttttggttttttaaagtgttggtattataggtgtgagttattgtgtttggtttttatgtttgatgaataaattgagaaaatggataaatatagttgggaagtgtaatatttttaaagaaaatttttgtaaagtagattaatatttttgtaatagtaataattttttatatttgattttgttttattaagaggtttgggtttttgatttttttgatgtttttttattttgggtgttgtggggtttgtgggtattagaaagttagtgtttttgataggatggtgtgtttgtattttttgtttggttattattttttttttttattttttttgtttatgttagtgtttttaggaattaagatgtgttttattttagggatgttgtttgattgggtagttttgtggagtttgttaagattttttaggtggatattgtgttggggttggtttaaggtgtttttattgtgtttgtttttgttgttgatgttgtttttttattagttgtaggagaagtttgaggattattggttttttgggtagtttaagtattattggtttttttggtttttgatgttattggttttttttgtggtgtagattgttggttttggagattttttagtttttttttgtttttttttattttaggagattattagtagtgagttattgttttggttataattttttagtaggatagtttgtggtttttaatttgtgaaaggaggattgttaagttagaaatgttaagttaagtgattattgttatgttaagttaagtgattattgttaagttaagtagttattgtaaagttttgtgggtaaggttaagttaatttgttatagattagtgtgtttgtttatttgtgatgttatggaatttgtgattttattgtaattgtagttttagttttttagaaaaagattttttggtttgtatgttgtgttgtagttttagttttttagaaaaagattttttggtttgtaggtggtgttgtagttttagttttttagaaaaagattttttggtttgtaggtggtgttgtagttttagtgttaatttgggttggttggtttttttttggaggttttggggtggtggtgtttagtttgtttgttatgagtgttgttttatagtgttgttggtgtatttgtttttaggtttgtttggtttaggggtatgggttagttttgtttttggtttggttattgtagtgaagttgttttagggtttgtgttgttaggatgtaagtggagtttgatggttgggttagagtggtttgttagtttggttggaagggtttgtttgatgttgttgtttgtttagttgttatttggtttgtgtttggagttagggattagttttgggtattttgttgttttaggatggggttgagtagttgttttttgttttgtgttgtagttgttgtgtgtatttgtttagggtttgtgtagttggtgatttgggtaggttggggaatgtttggtgttattgggattgtttgtttttagtttgttttgattttttagtttgtgagtattagtgagattgaagaaaagtgatggttgggtgt

SEQ ID NO: 126 - DNA, 2291 bp, Artificial Sequence
  chemically treated genomic DNA (Homo sapiens)
gttttaattttagtatatgtttgttgttgaagtaagttttgtttgttttagattgagttttgttttgttatttaggttggagtgtagtggtgtgattttggtttattgtaagttttgttttttgggtttatgttatttttttgttttagttttttgagtagttgggattataggtgtttattattatgtttggttatttttttttgtattttttagtagtgatggggttttattgtgttagttaggatgtttttaattatttgattttgtgatttgtttattttaggtttttaaattgttgggattataggtatgagttattgtattttgttaaagtttttattttatatatggatatttatgagttatggatgagatttagttttgttaaatttaattaatatatttgagatttagaattttggtgagggttttttgttataaatttgggaaaggataatatgggatattttatgatttaagaaaagggtttttagtatatagatttggtagtaatgaaaaaaggaaatttgtttttttttgtaatattatttgaattgaattttgagggtttaaaggataatttattatgaaggttttagttaagtttaggttgagataaaagtgtaataggtggggttttattatgttggttaggttggttttgaatttttggttttgtgatttgttttttttggttttttaaagtgttgggattataggtatgagttattgagtttggttaatatgaagtttttaaggatggaaggaatttgagtgatagtagaatatgtttgttgtataataggtatttagtttatgtttgatgaataaattgagaaaatggataaatatagttgggaagtgtaatatttttaaagaaaatttttgtaaagtagatgaatatttttgtaatagtaataattatttatatttgattttattttattaagaggtttgggtttttgatttttttgatgtttttttattttgggtgttgtggggtttgtgggtattagaaagttagtgtttttgataggatggtgtgtttgtattttttatttggttattattttttttttttattttttttgtttatgttagtgtttttaggagttaagatgtgttttattttagggatgttgtttgattgggtagttttgtggagtttgttaagattttttaggtggatattgtgttggagttggtttaaggtgtttttattgtgtttgtttttgttgttgatgttgtttttttattagttgtaggagaagtttaaggattattggttttttgggtagtttaagtattattggtttttttggtttttaatattaggggttttttttgtggtgtagattgttggttttggagattttttagtttttttttgtttttttttattttaggaggttattagtagtgagttattgttttggttataattttttagtaggatagtttgtggtttttaatttgtgaaaggaggattgttaagttagaaatgttaagttaagtgattattgttatgttaagtagttattgtaaagttttgtgggtaaggttaagttatgtgggtaaggttaagttaatttgttatatattagtgtgtttgtgtatttttgatgttattgaatttgtgtttttattgtatttgtagttttagttttttagaaaaagattttttggtttgtaggtggtgttgtagttttagtgttaatttgggttggttggtttttttttggaggtttgggggtggtggtgtttagtttgtttgttatgagtgttgttttatagtgttgttggtgtatttgtttttaggtttgtttggtttaggggtatgggttagttttgtttttggtttggttattgtagtgaagttgttttagggttggtgttgttaggatgtaagtggagtttgatggttgggttagagtggtttgttagtttggttggaagggtttgtttaatgttgttgtttgtttagtttttatttggtttgtgtttggagttagggattagttttgggtattttgttgttttaggatggggttgagtagttgttttttgttttgtgttgtagttgttgtgtgtatttgtttagggtttgtgtagttggtgatttgggtgggttggggaatgtttggtgttattgggattgtttgtttttagtttgttttgattttttagtttgtgagtattagtgagtttgaagaaaagtgatggttgggtgtggtggtttatatttgtaattttagtattttgggaggttgaggtgggtagattatttg

SEQ ID NO: 127 - DNA, 2291 bp, Artificial Sequence
  chemically treated genomic DNA (Homo sapiens)
taagtgatttgtttattttaattttttaaagtgttgggattatagatgtgagttattgtgtttagttgttatttttttttaaatttattggtgtttgtgggttgaagggttaggatggattagaggtgagtaattttggtggtattaggtattttttgatttgtttgggttgttagttgtatggattttgggtaaatgtgtgtagtggttgtggtatagggtggggagtggttgtttggttttattttaaggtagtagaatgtttaaagttggtttttggttttgggtgtaggttaagtaggagttgggtgggtagtggtgttgggtaggtttttttagttgggttgataggttgttttgatttagttattagattttgtttgtgttttggtagtgttgattttagggtaattttgttgtagtggttaagttgggggtggaattggtttatatttttgaattgagtaagtttaggagtaggtgtattggtggtgttgtgaagtagtatttatgataggtaggttgggtgttgttatttttaaatttttgagggaggattagttggtttaggttggtattggagttgtagtattatttgtagattaaggagtttttttttgggaggttggagttgtagatgtagtgaaggtataggtttagtgatgttaaaggtgtgtaggtgtattggtgtgtaatggattggtttggttttatttgtgtggtttggttttatttgtgaggttttgtggtggttgtttggtgtggtagtgattgtttggtttggtatttttggtttagtggttttttttttgtagattggaaattgtgggttattttgttgggaggttgtggttgaggtagtagtttgttattgatggttttttggggtggagaaaagtggggaggggttggggggtttttgaagttggtagtttatgttatgaggaagatttttagtgttgggagttaggaggattagtggtatttggattatttgggggattagtggtttttgggttttttttatagttggtggaagaatagtgttggtagtgagagtaagtatggtgagggtgttttagattagttttagtatgatgtttgtttggaagattttggtgagttttatagagttgtttggttgggtgatgtttttggggtggagtatgttttggtttttggagatattggtgtggataagagggataggaagaagaggtaatggttaggtgaaggatgtgggtgtgttgttttgttagggatattggttttttggtgtttataggttttatggtatttgggatggggaaatgttagaggggttaggggtttaggttttttaatgagatgggattaaatataaatgattattattattgtaaaagtgtttgtttattttataggagttttttttaaaaatattgtattttttaattgtgtttatttatttttttaatttatttattaaatataagttgaatatttattgtatagtagatatattttattgttgtttaggttttttttatttttaagaattttatgttggttgggtttggtggtttatgtttgtaattttagtattttgggaggttgaggagggtagattatgaggttagaagtttgagattagtttgattaatatggtgaaattttgtttgttatgtttttgttttagtttagatttagttaagatttttatgataaattattttttaggtttttggggtttagtttaaataatgttgtagaaagagatgagttttttttttttattgttattagatttgtatgttgaggattttttttttagattgtggaatgttttatattatttttttttagatttgtggtaggaagtttttattagaattttgagttttaagtatgttagttggatttaatagagttaagttttatttatgatttatgaatatttatgtataaaatgagagttttggtagggtgtagtggtttatgtttgtaattttagtaatttgggagtttaaggtgggtggattatgaggttaggtgattgagagtattttggttaatatggtgaaattttgttattattaaaaaatataaaaaaaaatagttgggtgtggtggtgggtgtttgtagttttagttatttaggaggttaaggtaggagaatggtatgaatttaggaggtggagtttgtagtgagttgagattatgttattgtattttagtttgggtgatagagtaagatttagtttaaaataaataaaatttgttttagtagtaaatatatattaaaattggaat

SEQ ID NO: 128 - DNA, 2170 bp, Artificial Sequence
  chemically treated genomic DNA (Homo sapiens)
gtgatttttttttttaggatttagtagtattttattgtgttatagtagttagtatttttaaagtatatattttaatattttttggttgtagtatatttaatttttttgttggggtgtgggggtttttttttttttgagtatagtttttggttttttgattttttttgttttatttttttgttttttaagtatattgtgtttatttttttaggtagtttttttagtggttgggtagtagtagggttttgagtttgttttttttggggtggttatatgtgtttattttttggggttggggattgttttttttgtttggttgttgattggtgtttttttttattttattttttttgttgttttttagtttttattttattttgttttagtttaattagttttattgttttttttttttggagaaaaaagttattttagagttttttgggtgttgtttttggttggaataaaagtgttaagaaataggtggaaagtattttatttttttaggttttatatttttagggtggatagtttgtttttgttttggttttgtttttggtattaataataattgaatttttatatgtgtatgtttttgtttttagtttgattgaaaggattattttgtgggttttttaaaaggatgtgattatttaggttaagtgggggtgggagagtttttggttgtttttttttgggaaagtgttttaattttttagttttaaagttttggagggtggagggtgttttgtgagagtttttgggggtgtggtttgtgttttttgggttttgtggatttgggtttgggggtgtgtgttttgtttttttttttttttggtggtgtagttgtttgggtgggggtggggtgggggttggggtttgtgtgggattaattaggattggggtgggagttgattgtggttggtggggagggttagttttgttttggtgggtgggtgtgtggtaggggtttttggaggttttgagtttttgggaggtgttttggttaattttgggttggtggggattgggtttgggtgtggggttttgaaggtgtggaaggaaagtttgggattttgttatttttttatagtgtttttttttttgtaatatttagtttttttattgtggggtttgggagtttttggagttgattttgttattattatttttttgggtgagtgtggaggatgggttggttattttggttaggttggaggtgttttttagtttggggttttgtgataattgggttgaaatttgagggttttggagtgtggtgggtggtgggagtttgtggagtgtggtgtatttggtggttaggtattggttagtttagtggtagtttttttttttttatttttatttttatttttggaaggagttgagaattagttgattggttggtaggttgaattgtttttttttttatggtaatatgtgttgtgattttttattttttgtttttggataaaggtgaatggtaattgtgttggttagtttttgttttttgttttgtggatgggtttgttgatgtagtaattaaaattagagttatttttttggaagagtaaattgttgttgttgtttttttagttttatggattttattttgtgttatttttgggttgattttaatttgtttattttagagttttttgttttatttttatttttagatttagttgtgtttgttgaaatattagttgttttttttgtgaatgaagtgtgggaatttgtttttgttgtagttaatgaaattaggaaaataaaaagattaaaagggttggggatgggagaatgaagaggaatgtagatagatagtttagggttatttattggtttttggtgatttttagttttttaagttgattaaaataatgtgaggaaatgtgggtttttttattttttaggaagaggtaataatgggtattttatgtggtgttatagtgtttgtttttaaagtttgaatgtgaatgtagtaagtataattttattaatgaaaatattttttagataattgttaatattgatgaaagaagagaaatagagatatggaagttaaagagttgggaattttaaaggttaaaggatgttttttagttattttgatgttttgtgtttttttttagttggtataaaattgtgagtagtttaattatattttgta

SEQ ID NO: 129 - DNA, 2170 bp, Artificial Sequence
  chemically treated genomic DNA (Homo sapiens)
tgtaggatataattaaattatttatgattttgtattaattgaaagaaaatataggatattagagtaattgagaaatattttttgatttttaggatttttaattttttagtttttgtgtttttgtttttttttttttgttaatattaatagttgtttaaagaatatttttattaataaaattatgtttgttatatttatgtttaaattttgaaaataaatgttgtggtgttatgtaaaatgtttgttattatttttttttaaaaagtggagaagtttatatttttttatattgttttaattagtttaaggaattaagaattgttaaaagttagtgagtggttttagattatttgtttatatttttttttatttttttatttttaatttttttgatttttttatttttttgattttattaattgtgatgagagtaagtttttatattttatttatagaagaagtaattgatattttagtaaatatgattaaatttaaaaataaaggtgaggtaaagagttttgaaataaatgagttaaaattaatttgaaaatggtataaagtaagatttgtggggttggggaggtaataataatgatttgtttttttaaaagagtggttttaattttgattattgtgttggtgaatttatttgtagaatagaaaataaaaattgattaatgtagttgttatttatttttgtttaaaggtaaaaggtgaaaagttatgatatatattgttatagaagagaaggtaatttaatttgttaattaattgattaatttttagttttttttaaaaataaaaataaaaataggagaaagggggttgttgttgggttggttgatgtttggttgttgagtgtgttgtgttttgtaagtttttgttatttgttgtgttttaggatttttgggttttggtttagttattataaagttttgggttggaaaatatttttggtttggttagaatggttagtttgttttttgtgtttgtttggggggataatggtggtgagattaattttaagggtttttgagttttgtgataaagaggttggatattatgggaggaaggatgttgtggaagaataatggagttttaaattttttttttatatttttagagttttgtgtttaggtttggtttttattggtttgaagttggttggagtgttttttgggagtttggggtttttgggagtttttgttatgtgtttgtttgttagagtggggttagttttttttgttggttgtggttgatttttgttttggttttagttaattttatgtgggttttggtttttgttttatttttgtttggatagttgtattgttagggagggggaggggtggggtgtgtgtttttgggtttagatttgtaggatttagggggtgtgggttgtatttttgagaatttttatgaggtgttttttgttttttaggattttgggattggggagttgaagtatttttttaagggaggatggttaggagtttttttatttttatttggtttgagtggttgtgtttttttaaagggtttgtggggtggtttttttggttgggttagagatagaaatgtgtatgtgtgggagtttagttattattgatgttgagggtagagttggagtaggagtgggttgtttattttagaaatatgaagtttagagaagtgaagtgttttttatttgttttttaatgtttttattttagttgagaatggtgtttaaggagttttgaagtggtttttttttttgagggaagaaggtggtggggttgattgagttggaatgaagtaggatggaggttggagagtggtgggaagggtggggtagggggaggtattaattagtagttaagtgggaagagtgatttttaattttagggaatggatatgtgtgattgttttggagaagatgggtttggaattttgttattgtttggttgttgaaagagttgtttggaagagtgagtataatgtgtttggaaggtggggggatggggtagaggaaattgggaagttggggattgtgtttggaggggaggagatttttatgttttggtggagggattgaatgtgttatggttgaagggtgttggagtgtgtgttttagaaatgttaattgttgtagtgtggtggagtattgttaaattttaagaaaaaaaattat

SEQ ID NO: 130 - DNA, 2377 bp, Artificial Sequence
  chemically treated genomic DNA (Homo sapiens)
ttttggttgaagttgtggggagggggagtgaagtagtttggattgaataggatatattgaaggggaagtagtaagagtggtgagtggtattatttgatgtttaagtttagtaggatttgtttttttttttgatttgggtgaattttgattttaatgatgtgtaatggttagggagagagaaatttttgagagagggtagggatagggagaagtatttgagtttattttgggttatttattttttttagtttatttttttatttttttttttttatatatatttttttatttagttttatttgtgtaaatgtaaatgtttgtagatgggggttagattttttaatagttggagttatagttttagttagaagtttttttatatattggtttaggaagggttagatttgggttataatttgggaggaaagagagatggttagaggagagtttagtttttttttttaaggtaagtttttttagaattttttttatggagagtattgagggttgaggatgggtttggtaagaagaaataaatttttattttttttttatgaagattaaaaattaaattaatttttattttattgagttatttagttttttttatgtttgggaagttgatttggaggtggggaaggtagagatagtgatgtgtagtatatttttgtttttggttttttattaagatgttggtggtgtgttatagaggagagggagtgtgtgtgattttttatatttagggtgggtgaggggtgaggatgttttaaaggtttattttttatagagtttgggggttgatgtttttttaataaggggagttgataaggtagaggttatgttgttgttttgtggatagtttagggatgtggtgaaatgatagttgttgagagagagaggagtgggaggaggagaagggtgtattttttttggagggggaggtttagttaaattggagtttgagggaattttgggatttaaaaagttttggttttaggttggttgtggtggtttgtatttgtaattttagtattttgggaggttgaggttggtggattatgaggttaggagtttgatattagtttgattagtatggtgaaattttgtttttattaaaaatataaaattagttgggtgtggtggtgtgtgattgtaattttagttatttaggaggttgaggtaggagaattgtttgaagaggtagaggttgtagtgtgttaagtttgggttattgtattttagtttggtaatagagtgagattttgttttaaaaaagaaaaaaaaaaaagtttttttttttagtttttttaattttttttagatggggtttttagagtaggaaggtgaagagggaagtaagtttttttttgagttagggaggggttagaagatttaattaggtttggttttgtgggttttttggggtgtgtgtgtgtgtttttttttatttttttttgtgtgattttttttaagggaaaggatatttgtgttttgtattgggggtaggaagattggtttttatgatgatgaggaggagataaatatttgttgtttaggttataggttttttagagttatttggttttttttttttttttttttttagtttagggtttgggaagtttggttgtgtttgtttagtgttaattttgatttttttttgttgttattttttttttagattggtatttttgttgggaggggttgggtaattggttttgtttttgtaagattagagagaaggtatttgttttagtataggagatgtggttgttgtagaaataagggtttttgttttaatggaataagtgtagtttatagtttggaaaagggtgtggttggttgaggagtgtgggggagtgtgtgttgtgggtattgtagtagttgtattatttttttttgtagttttttttttgtttagtagttgtttttgttgtgttgtagtttggtggttggaggtttgaaggtggttgtttgagggttgtttaggggttggggttgggttttagtgggtatttggggataaaagtgagaaaagagagaattgtatggttttaagtaggtaaaaagttttgaggaggatgggaaagattagggaaatttttgagaggtaatgggattaggatttttaggagtagtaaagttgtgagtggtattaaaagtaagagggatgtttaagatggtttggttaggagggagagttttggttgagatggggtttttagatgttattattgttgttgtttaagtagaggaagaagttttgattttgtggaaggatttagtttgggtatgtgaaagggtgggtggggagagtgagtagttggttttaagagtggtgtgtttagtaggtaggtggttagtggggagagagggg

SEQ ID NO: 131 - DNA, 2377 bp, Artificial Sequence
  chemically treated genomic DNA (Homo sapiens)
tttttttttttttgttagttgtttgtttgttggatgtgttatttttggaattgattgtttattttttttatttatttttttgtatgtttagattggatttttttatagaattaggatttttttttttatttgggtaatagtagtaataatatttggggattttgttttagttgaagtttttttttttagttaagttattttgaatgttttttttgtttttggtgttatttgtggttttgttgtttttggaaattttggttttgttattttttaaaggtttttttagttttttttattttttttgagattttttatttatttaaagttatatggttttttttttttttgtttttatttttgggtatttgttaggatttagttttggtttttggatgatttttgggtagttatttttaagtttttagttgttagattgtagtgtggtagaggtggttgttggatggagggagggttatgggaggaggtggtgtggttgttgtagtgtttgtggtgtatatttttttgtattttttggttggttatatttttttttggattgtgggttgtgtttgttttgttggggtagagatttttatttttgtggtggttgtgttttttgtgttgaggtggatgttttttttttagttttgtagaggtgaagttggttatttggttttttttagtagaggtgttagtttagggggagaatggtagtagagaggaattaaaattgatattagatagatatagttaagttttttaggttttggattggaaaggggaggagaaagagggttaaatggttttaggggatttgtagtttaggtagtaagtgtttgttttttttttattattatggaaattaatttttttatttttaatataaagtgtaggtgtttttttttttaaaaggagttatatagagaaagatagaggaaaatatatatatatattttaaaaaatttataaagttaggtttaattaggttttttggtttttttttgatttaaggaaggatttgtttttttttttatttttttgttttagaagttttgtttgaggggagttgagaaggttggaaaaggggattttttttttttttttttttgagatggagttttgttttgttgttaagttggagtgtagtggtttgaatttggtatattgtaatttttgtttttttaagtgatttttttgttttagttttttgggtagttgggattatagttatgtgttattatgtttggttaattttgtatttttagtagagatagggttttattatgttggttaggttggtgttgaatttttgattttgtgatttgttggttttggttttttaaagtgttgggattatagatgtgagttattgtggttagtttggaattaggattttttaaattttaggatttttttaaattttaatttgattggatttttttttttagaaagaatgtgttttttttttttttttgttttttttttttttagtagttgttattttattatgtttttgagttatttatagggtaatagtgtgatttttattttgttagttttttttattagagagatattagtttttaaattttgtgaggaatgaatttttggggtatttttgttttttgtttattttgagtgtgaggagttatatatatttttttttttttgtggtatattattagtattttagtaggaaattagaggtgagggtgtgttgtatgttattgtttttgttttttttatttttaggttagttttttagatgtggaaaaggttgaatggtttaataaggtgaggattgatttgatttttagtttttatgaggggagaatgggaatttgtttttttttgttagatttatttttaatttttagtgttttttgtggggaggattttgaaggaatttgttttgagagggaagattggatttttttttgattatttttttttttttttagattgtggtttaggtttggttttttttgggttagtatatggagaagtttttggttgaaattgtggttttggttgttaggggatttaatttttatttgtaaatatttatatttatatgagtggaattgggtgaaaaggtatgtgtggaggagggaaagtgaggaggtaggttagggagggtgagtggtttggagtagatttaggtatttttttttatttttgtttttttttaggaatttttttttttttagttattgtgtattattggagttaaggtttatttaggttagagaaaagagtagattttgttggatttgaatattaggtaatattatttattatttttattgttttttttttaatgtgttttgtttagtttaggttattttattttttttttttgtaattttagttaagg

SEQ ID NO: 132 - DNA, 2356 bp, Artificial Sequence
  chemically treated genomic DNA (Homo sapiens)
taatatatattttttaaggtaattaaagggaatatttatttttgtttgaggaaaaaatattttgtaagttaaaatttttattaatatagtattttattatatgattttttttttttattttaaaataatggggtttaattttttgaagtgtagtttttttagtaataaaggtggataaatttgtttttttttgtaagtagatattttttaaaggtaagaaagggaagattttgttagtttagtttattatagttaatgttttttttattaagtgtttaattgttttgaaagttagatgttttagaaagttagatgttttatagttgttttggtggtaattattttaagatagtggtattaaaggttttgatttttagtttttttatttaaaaaatggggatattaattattttataataaagttttgatgatataatgagattataaataaaatattttgtgatgtttgatttattatttaattaaaatttttataatggatttatatttttggtttagttattatatattttgttaagtggtttttttttaagaaaaattggggatgggggggttaggggggtgggagagtagtagggagtaggaggtagggaaggaggaaaataagtaaaattagtatatatataagtttttttatttttgattgtttgtgttttttgtgttttttttttttaagtttttttaggtttatgttttgaatttttttttttataaatgaaatataatggatatgaattatagagaattttatggaagatattggagtttaagtttgtagattagttttttgtttataagtggaggtgattggaaaattaagttaaataagtgttggataattttaaatagttaaagaagttttaatgggatagggtttaggtttattaaaggaggtaatattagtaattgatgaaattatagtgatggttgattgattatgatttgaggtataagatgttaaatttaaggttattaattaatgtgtgtaagaagtggttttaattgatttgggtgatgttaattgtgtaattattggttgttgtgttattttaggtttaggaatagtttagtttgtaatagggagattttaattagggagaggaggagtggggtaaaggggttgggtgttttttaagttgttgtgtgggatgtggaagggatgaaagaggtgaggaagagtagtaaattaatttaatatatttatatttttgttgtgtttttaggattatgagaagtgggtagggggtgatttttggttttttttattttgtaaaggtttttaattgggttttttggttaattttttagttattgttattttgaaattttgtgtttttttgtattttttatgttattttttatttttttgttttgtttttttttagtgttgtttgattttggaattatagagaatatttaagaattttaggattagagttttttttggttttatataatatttaattggttggttgttggttaagagtttgttttattgtgtttatttagtataataggaattagaagaagatagttgttaattgagtggttgatggttttgttttttgagttggaggtattttgatttagttgttgggagtttggtatgttgagttgtttgagaatggtatattttgtagataaagaagtgttttgtgttttttgttttttggaattattttagtttttgtatttttttgttttttatgatttaagtaggtgtgattttttaggggtgtttttgtgtgtaaatgaatatttagataatatttgttattgagtttaatttgttttgtaagtattaggttattttatgtgagtgtttagtatgtgtggaaatttaatagataggtagaatagaatgtttgtagattatttgaataaataaattagtatttgtattagagttgtagattgtttatatgggtggtgatttattatttgttagtagtgttttgaagaagaaatatggggatatatatgtagttggttttaagttatatgagtggtaaggttgatatatattggttatatttttgattggtttttttattagttaaaagttttttatgatgttattttatgtatgggattttttatttaattttagtttttgttttttttttattttttattttttttttttgtgagttagtttttatttattttttttaaaggtaagtttaaatatttaaaaaattattttagaggatatgtttggttatttttaattttaatttgattattttatgtaggaaggttatttttattattagttataaatattttaaaatattgatggagatatatattaatttttagtagaatttttaaa

SEQ ID NO: 133 - DNA, 2356 bp, Artificial Sequence
  chemically treated genomic DNA (Homo sapiens)
tttaaagattttgttaaaaattagtatgtatttttattaatattttgaaatatttataattggtggtaagaatagtttttttatatgggatagttaggttaagattagaaataattaagtgtattttttaagatagttttttaaatgtttaaatttatttttaagggaaataagtgggggttgatttatggaaagaggggatagaaggtagggaaagggtgaaggttagagttaagtgaagaattttgtatgtagagtgatattatagaggatttttggttggtgaaaagattagttgggaatatagttaatatatattaattttgttatttatataatttaaaattgattgtatatgtatttttgtattttttttttaaaatattattaataaataataaattattgtttatataagtaatttgtgattttaatatgggtgttaatttatttgtttaggtggtttataaatgttttgttttgtttgtttattaaatttttatatgtattaggtgtttatatgggataatttgatgtttataaagtggattaaatttagtggtaaatgttatttgggtatttgtttatatatggagatatttttaaaggattgtatttgtttgggttataagaaatagaaaaatgtaaaaattaaggtaattttaaaagatagaaaatgtagaatgtttttttatttgtagaatgtattgtttttggatggtttaatgtattaggtttttagtaattaagttaagatgtttttaatttgagagataggattgttagttatttagttagtagttatttttttttaatttttattgtattagatgagtgtaatgaggtgggtttttagttgataattaattaattgagtattgtatggaattggaagagattttggttttggaatttttgggtattttttatggttttagggttaagtggtgttaagagaaggtgggatagaggaatgggaaatgatgtgaggagtgtggaggggtgtgaggttttaagatggtggtagttgaggggttgattgagagatttagttgaaggtttttatgaagtgaaagaggttgggagttgttttttatttgttttttgtagttttgggagtatagtagaagtgtgagtgtattgaattgatttattatttttttttattttttttgttttttttatgttttgtgtagtggtttgggggatatttagtttttttgttttgttttttttttttttggttgaggtttttttgttgtggattgggttatttttgggtttggggtggtgtggtgattagtggttgtgtggttggtattgtttgggttggttggggttgttttttatgtatgttgattagtagttttaggtttgatgttttgtattttgagttatggttggttagttgttgttatggttttgttagttgttggtgttgttttttttggtgaatttggattttattttattgaagtttttttggttgtttagagttatttaatgtttatttggtttgattttttagttgtttttgtttgtagataaaaaattaatttgtagatttaagttttagtgttttttgtaaaattttttgtaatttgtatttgttgtgttttatttgtgggggaggagatttagaatatgagtttgaggaaatttgagaaaggaaagtataaaaaatgtaggtaattaaagatgggagagtttgtatatgtattgattttgtttgtttttttttttttttattttttattttttgttgtttttttatttttttaatttttttatttttagttttttttagaaggaaattatttgatagggtgtatggtagttaggttaggaatatggatttattataaagattttagttaagtagtgagttaaatattataggatattttatttgtaattttattgtattattagagttttgttataaagtaattgatgtttttattttttagatgaggaagttaaaaattagagtttttgatattgttgttttgaagtaattgttattagaatagttgtgaaatatttggttttttgaaatatttggtttttggggtagttggatatttggtgaaagagatattaattgtaataaattgggttgataaaatttttttttttttatttttaaaaagtgtttatttgtaaaaggaagtaaatttgtttgtttttattattggaaagattgtgttttaaaaaattaagttttattattttggaataagaggaagaagttatgtaatagggtattgtgttaataaaagttttagtttataaaatattttttttttaaataaaaataagtattttttttaattattttaagaaatatatattg

SEQ ID NO: 134 - DNA, 2403 bp, Artificial Sequence
  chemically treated genomic DNA (Homo sapiens)
tgtgggtgtgggagtagttttgttgggtgtttgtagttgtgggagttaagttttttttttaggtgtaggtataaaagtttatggtttttgaataatgtggggtagaggtttttttaagtaatgtttaattggttgtttttaattaaggaaagagaggtttttagttttatggtaatttaagtagggtagttttaggttaaaggtattttagaataataagattattttaagaaatggaatgttttattggatatttgaataggttttttgttattggaattggtgtgtattgtattttaattagtatttttgtgtggagggaggtgatttagtttaggaaagttaattatagaaagaggtgatttttgaaaggattgttttagtgttattagaatatatgtgattatattaaaagtttaggtggatatttgtagttagtttggatttggataatttaatattgttggtagaattgaagggaataagttattttaattttattttttgtatgtgtagtgttgagtgagttgggggtgggaggatagtggtttgtttattgtttttttttaaaatttgagatttgaaaatatggaggttttatttgtttttttagtttttgattgttaataaaaaaataaattttgttggttatattttttttttattttaaaatagtaattttatggtttgtattaagttttttagaagtttattttatttgttttgggttagggagggaataatgttaggaaaagttattggtgtttttttatttttgttttttttagggtgtaggatgtgtgggttggtgggtttgtgattttggaatgttttttgttatttttttgtgtgaatttgaaaggattgggaggtgttgagagtagagtttagggttggtgtattttgtggtgttgagtgggtggtgtgtttgggtgtttaggttgggggatttgtagttgttttattgtggaggggaaaatatgtagttggagggtgtgtgttgtgtgggttgtgatttgttattttattggttattttggggtttttttaagtttttaggtagggttgtgagagttttttagagttgaagttttggaggttgatttgtgggtttggttgttatgggaatttggttggtttaaagaagttttttttttgggtatttggaattttagtttagtgtggggtattggggaagtggtgttggggggttgggttgggggattttagttggtagttttggagagggtttatttttggggttgttgggtgaggttggtatgatttttggttttaaaaggaaagtttttgttttttgttttggtgtgagaagttaaagatttattttgagagtggagagagaaatgttattggtaatgttttttttggaaagtttgagaggggttttttggatatattatttagtgtttttaaattagagaagtagtttttttttggtgtttgggtttagaagttgttatttatttagtttatggtttgaaattagtatgggaagtgttggggtaaggttttgttggagattagaggtttgtttgttgggaggagtttttgggggatggggattttatttttttgtttgttttggtttttatttgggatgtttttgtaggagtttagaaagatgatttattatatggttttgggatagagtagtgtgtttaattttgagggaattttgtgtgtttttttgaggttttagttttttaaggtattgttgtttgtttttttttttttagattgaaattggggaagagtgtgggtgtttttttgttttgatgagtttgtttttttaaatgtttattttggttgtattagagtatttgggaaattttgaaaggtgtttaggttttatatagtagtgtttttttatttagtttttgtttttgggtttttttaagagagtttttattttatgttttggtttttttttgatgttgggtttttgaggtaggtatggagtttttttgaaagtagttgtttatttgtgtttttttggtgtaaagttagagtttattttgttgggggaaggggaggtagaaaagattatagttgggaaagtgtgttttttgttttgtttttaaaatatgttttaagattgttattgtgattgttaggagagttattaatgtttaggggttataaaggaatttttgaatttttggttttttttaaatttttaggtttttaaaattttagtgggggttttttggggttgggatttaggttggtattgttgggaggattttgtttagtatttttttattaatattttatgaaggtaggtttttgttttttttggagtttttttttttggaatgtttttaaattttggttaatttatttttttgtgagttattttagggttttgtggtttgggaagag

SEQ ID NO: 135 - DNA, 2403 bp, Artificial Sequence
  chemically treated genomic DNA (Homo sapiens)
ttttttttgggttatagagttttaggatggtttataggggagtgagttagttagagtttgggaatattttgagaaaagaggttttagagaaggtaggagtttgtttttgtgaaatattaataaagggatgttaggtgaggtttttttagtggtgttagtttgaattttagttttaagagatttttattagggttttaggaatttgggggtttgggaagggttgagggtttagaaatttttttatagtttttagatgttgatagtttttttaataattgtgatgatagttttgaggtatgttttaggaataaggtgaaaagtgtatttttttaattgtgattttttttattttttttttttttaataaagtaaattttaattttatattaaaggggtatagataggtaattgtttttagagggattttgtgtttattttggggatttgatattgaagaaagattgaggtatgaggtagagatttttttgaaaaaatttaaagatagaggttgagtagggagatgttgttgtgtgaggtttgggtattttttagagttttttagatgttttggtgtagttgaagtaggtgtttggggaggtgaatttattggggtaaagaagtgtttatatttttttttagttttggtttagggaaagaagaatggatggtggtgttttggaaagttagggttttagagaggtgtataaagtttttttaaagttgggtgtgttgttttgttttgggattatgtagtggattgtttttttgggtttttatggaggtgttttaggtgggaattagagtaagtaggagaatggggtttttattttttaggggttttttttgataggtaggtttttagtttttgatgaagttttgttttggtgttttttatgttgattttgaattatgggttgagtgagtggtgatttttgagtttaggtattaaagaaaaattatttttttggtttgggggtattaggtagtgtgtttagaagattttttttgaattttttaaagaaaatgttattaataatatttttttttttgtttttaaaataagtttttggttttttgtgttagaataagaagtagaaattttttttttggagttaagaattgtgttggttttatttagtgattttaagggtaggttttttttggagttgttggttgaggttttttaatttagttttttagtgttatttttttgatgttttatattaaattggaattttaggtgtttggaagaaaggtttttttggattaattgggtttttatagtagttagatttataggttagtttttggggttttagttttaggggatttttatagttttatttagaggtttggggagattttaggatgattgatggggtaatggattataatttgtatggtgtatgttttttagttatgtatttttttttttgtggtagggtgattataggttttttggtttgagtgtttgggtgtgttgtttatttagtattgtagagtgtattagttttgaattttgtttttaatattttttagtttttttaagtttgtgtaaggggatggtaggaagtgttttgggattataggtttgttggtttgtatattttgtattttggaaggggtgaggatggaagagtattggtgattttttttagtattgttttttttttggtttagagtaaatgagataaatttttgaagggtttaatataagttatagggttgttattttggaatgaggagaaaatgtagttagtgggatttgtttttttgttggtaattaagagttgggaaaatgaatgggatttttatatttttagattttagattttaaaagggggtaataaatgaattgttgtttttttatttttaatttatttagtattatgtgtataggggatggggttggggtaatttgttttttttagttttgttagtaatgttgaattgtttaaatttgagttggttgtgggtgtttgtttgggtttttggtgtggttatatgtattttaatagtgttaagataatttttttggaggttatttttttttgtagttgatttttttagattgggttgtttttttttatataagagtattggttgaagtatagtatatattaattttaatgatagagaatttgtttgggtgtttagtgagatattttattttttagaatgattttattattttaaagtatttttagtttgaagttgttttgtttgggttgttatagagttggaagtttttttttttttaattagaagtggttaattagatgttgtttggaaaaatttttgttttgtattgtttaagagttataaatttttatgtttgtatttggggagggggtttgatttttgtggttgtgagtgtttagtggggttatttttgtgtttgtg

SEQ ID NO: 136 - DNA, 2354 bp, Artificial Sequence
  chemically treated genomic DNA (Homo sapiens)
tataatttttggagttgttatttttggtttattattattgattgttttgggtttgatggagttagttttgtaatatttgtttagaattttatttatatatttgttggatatttgtataggggaagtggatagaaaattatattattaataattttaagataaaaataaaattgtttaagtatgtattaaataatgataagtttatgttttgattgtttagtatttggatttttgtatttgtatgggtttataatataaaaatatatttttaatggtatgagaatttattgtagagagtttttttttttaaaattatatttgtagttttaaaaattataaatatgatgatatttttaaataatttgaattaaaaaatgaatttaaaagttttttttaaaaaaaaaattttttttaaatattgtttgaagatgtattaaaatgaagtagataaatttatttttgtgttgattttgtttaaagtggtgttatgttttaaagaataaaggtaaaaaataaattgatttttttatttttttttttttaaaaaatatttaattgagtaaatgtgagttagggaggagtaaatagtatttgttttttaaaattaatatatattatttataaatatgaagaataaataaatattttaaaagttgaggtaagtatgggttggggagagtagaatgaaattatgttggtttatataatttagtttattatggtttataaattgtttttataatgaatgtttttattaaataaaaagagaaagatttttttaaaaaaatttgtatataatatttttttgaagtagatgagttattttatgtaattgatttaggttgaaagagatagggaaggatggtggaaggagaggggaaagtgggaaggtaggggagtgggtggggggattggggattggggtgggtgagggtgggggggtttataattagtattgtttatagtaagaaatgaagagagggtgttgagagtggagggttgtgggggtggtgagtggggtggtgttgggaggattatttgtagaatttgggaaatgttgtatggttgggttttgttgtgagttagttttataattttttgttgggtggagtttggtagtggttgtttgttgataaagatattattgagttgatttattttgttgtgatttgaggaaagggagaggagaggaaaggggaaaagaagagaagagagtagagtgaagaggaagaagagggagaagaaggaagaggaagatgagggagaataagaatagaaaggagaggaggaaggggaagaggaagaaggagaggaggaggagataattataatgtatttttatttttttgttaatttgtgttaattttggtggttagttttttgttattgattaaataaaggataataggattattagttatgttagatattgggtagtttagtttaagtaattgtgtttttgtttattgtattgtagtagtaatatagagttagatatatgttaaggaataagtatatatggattttattatagttataattttagtagtgtttttagtttattgtttttttttataaatattgtagttagtttttgaatttataaagtgttaagaattggttttataaattttttaaagattttttttgagtgttattgtaaattatgggttttatagattttatattgaatttttaaggtttttgtagtgttgggatagtgatagtaaattttatagtttttgagtgtttttttagatgttaaaatttagaaatgtttttattattgtttaaattggttaaggtttggtataagtattgagttgggttttgtttggttagaatagaagaaggaagaggagagaataattagagtagttagtatgtggttggtgaattttagtttaggtttttgtatttttagtgtagatgtgagagttagagtttgggtttggttttagttatagataagtttggttattgtaagtaaggtttagagttgggagttggtttgtattagttattgtttgttttatttttgttgttgaattttgttttttttttagttaaggatagatattattaaaaagaaaaaatagaaaagaaaaatattatattatagtgttttttattttttttttatttttgtattttataattttatttttgtggtttaattttagagaatagggagagggagttagtttttttttgtagtttttttttttaaaaattatagatatataaagttaattgttaatttttatttttttaaaaatttttaatttgtagttttgatttagatagtagtttttttaggaaaagatgtggttttttgtttagttttttttttt

SEQ ID NO: 137 - DNA, 2354 bp, Artificial Sequence
  chemically treated genomic DNA (Homo sapiens)
ggagaggagagttgaatagggagttatgtttttttttgggagggttgttatttaagttggggttgtaggttggagatttttaaggaagtggaaattggtaattggttttgtgtgtttgtggtttttggggagggggattataaagaggggttaattttttttttttattttttaaggttggattatagggatgaggttgtgagatataaagataaaggagggatggggaatattatgatgtggtattttttttttttgttttttttttttgataatatttatttttggttaaggggagggtggagtttagtggtggaaataaagtgagtagtggttggtgtgaattgatttttggttttaagttttatttgtggtggttggatttgtttgtggttgaagttgagtttgggttttgatttttatgtttgtattggaggtgtggaaatttggattggggtttattagttatatattggttgttttggttgtttttttttttttttttttttattttaattaaataaaatttaatttgatgtttgtgttaggttttggttagtttggatggtgatggaaatatttttggattttagtgtttaagggagtatttaagggttgtaaggtttgttattattgttttaatattgtagagattttgaaggtttagtgtgggatttgtagaatttatggtttgtggtgatatttagaggggatttttgggagatttatagagttggtttttagtgttttgtgggtttagaggttggttgtagtgtttatgaagaggggtagtgggttggggatattgttggggttatggttgtagtgaggtttatgtgtatttgttttttggtatgtgtttgattttgtgttgttgttgtagtatagtgggtaggggtatggttgtttggattgggttgtttgatgtttggtatggttggtggttttgttgttttttatttgattgatagtagggaattgattgttgaggttggtataggttggtagggggatgaggatgtattgtggttgttttttttttttttttttttttttttttttttttttttttttttttttgtttttgtttttttttattttttttttttttttttttttttttttttttttttattttgttttttttttttttttttttttttttttttttttttttttttttaggttatagtggagtgaattagtttggtggtgtttttgttaatgggtggttattgttggattttatttggtagaagattgtagagttagtttatagtggggtttggttgtgtgatattttttgaattttgtaggtgatttttttggtgttgttttatttgttgtttttgtggttttttatttttaatgttttttttttattttttattgtaaatgatgttaattatggatttttttatttttatttattttagtttttagtttttttatttatttttttgtttttttatttttttttttttttttattatttttttttattttttttaatttgggttagttatataagataatttatttgttttagaaaaatattgtgtgtggatttttttaaaaaaatttttttttttttatttggtaaagatatttattgtgggaatagtttatgaattgtaataagttgagttatataaattggtataattttattttgttttttttagtttatgtttattttagtttttgaggtatttgtttattttttatgtttatgaataatatatattgattttaaaaggtaaatgttatttatttttttttaatttatatttatttaattgagtattttttaaagaagaagaagtaaaaaaattagtttattttttatttttgttttttaaaatataatgttattttaagtaaggttagtataaaaataaatttatttattttgttttgatgtatttttaggtagtgtttaagaaaagttttttttttaaaaaaagtttttaaatttgttttttagtttaaattgtttgaaagtattattatatttgtagtttttagggttataaatgtaattttaagaaaaaaagttttttatagtaagtttttatattattgaaggtatatttttgtgttatagatttatgtagatgtaaaagtttaagtgttggataattaaaatgtaagtttgttattgtttaatgtatatttaaataattttatttttgttttgaaattattaataatgtggttttttgtttattttttttatgtaggtgtttaatggatgtgtgagtaaaattttgggtaggtattatgagattggttttattagatttagggtaattggtggtagtaaattgagagtagtgattttagaagttgta

SEQ ID NO: 138 - DNA, 4102 bp, Artificial Sequence
  chemically treated genomic DNA (Homo sapiens)
gtgttgttatttattttgtttttttttgtgtatagttaatggagagatttagttgaaattgtgaagtttttttgtattgggtttttttgtttggtgattgatgttttagagttaatagtgagtgagtagttggagtggggaagtagaagttagagaggggaagaatatggtgttttttttttttttttttttttttttttattttagtttttttgtgtattttgtttttaagtttttgtgtagttaggagttgttgttgttttttagtttttgttagttgttttttgagttgagtgtagtgagtgttgttgtttgggttttttggtggggttagggttagtatggagtatttgggtttgtattatttttatttgggttatgtagagtttattagttttggtattgattagatttttaatagtttggattagggtggttgtatgggatttgttttgtgtttttaggatggagaatatggttttggttgtttggttggaggtgtttatatttatggtggtgggggttttgtggttgtgatgggggttggaggagtgggggtttatggtattggaggttttggtggttttggaggtttggtaggtggtggtggtgtttgtagtatgggttttttgattggtttttataatgtgaatatggttttggtaggtggttttggttttggtggtggtggtggtagtagtggtggtgttggggtatttagtgttgtgggggtaatttgggtgttggtatataggttgtttgttggagttgtggtttatttttagtttttggttattggtttgtttattgtgttttttgtgtttgttatgttgggtgttaataattttattggttttatttttttttggatggagagtaattgtagatatataaaggataggtttataggtgagtttggtttgtgtgttttttgtttggttgtggtttgggttttgtgttatttttgttttgttgggtggttttttaaagttggttttgtgttttaggttgtttagttttttttggtgttttttttaagttgagttgtttgtttgattttataatgtagatttgttatgtttgaagagtttttttagtttggatttttttttgttttttgaaggatttttgtttggaggagttttttttggttttttttttggatttattagttgggttaggtagagagaaggaggttatagatttaggattattttttgtagttatttttggtttgggaattttagagaaaggggtgtaatgtgaatagttttttttgttttggttgttgttttaggatttaggaagtgagttttaggattagatataagaaaagaataggtttttttatttttagttttttatatatatgtattttgtgtttttagttttggtgtttgtggtgttgtggggttagtgggggttttgagttttggtaaattagtagaattagtggtttttttttttttttttggagagtaggttttatttgggaggatggtagtggggtttagttgtttaggatagttagttttttatttttgtttttttttggttgggtgttttattttgggtttagttttgttattttgggtatgaataatgtattggtaggttggtgattggtggtgggaagattatttttgggatattgggtattaagtggtggttgttgttgttttttttgttgtttgtttttgtttttttttgttggttttggttttttttgtttttgtttttattttgggtatttaattttttttttggtgtggatttttttttttgtttttattttttgttttttttagggttttttggattttagattatgatttttttgtttgggttgggaagtagttataaattgagtttaggttagttagttgattttagagagaggaggtaggaggtattggttgttgttggtagagatggggttttttgggggttttttggtttaagggtttaatagtggaaggggggtttatataattatttgggagaagttgttgagagttagatattgggttaggagattttaaagtatttttggttttttgtttttgttttaggtagtagtatagttagggaaattgtttttgtagttttttattagattttggggttatggtagaagtggtgtggaggttggtgtttagaggaagaatagttgtttgggtttaggttttaggaagggttttttttagaggggttttagtgtttttaatttaagttttttttggtttggggtagtagggtttggtgtttattttattttttatttaggttaggttagttttgaagggttttgttggaaatttagttgggagtttattaattttgggtttttggtgaaaggtatttggtttagggtttattgtggggttttaatattgtgttaggtatgaaggtggttttagtgagtgtatggttgtggttttgttttgttttgtgttttgtgtgtttgttttgtgtttgtgtttgtttggttttgtttgggtgtatagatttgtgagtttgtttttgttgtatgttgtgttggtgtgtgttgttgtggatggaggtttaggttgggttttagagttaggtttggttttttattttgagtttgaaggtttggggttgattgaggggaggggagtgtgattattagtttgttttagattgtttttggaggagaggtggtagggaggtggttgggtttgtgggagtttggggttagggaggtttttgtggtagtggtgatggtggtgttggattggtgggtaggaggaggttgttttttgttgtgggtttgttgttgagggttaatgggaggattttggttttgtttgtgggggtttagttgttgtgtttgttgatttgtggggtgttgggtttgggatgttttttgatgttttgttgtttgtttttgttgtttgtttgttttttgttttagtggtttttttattttttattgtaatatgttgtataggttatttttattagaattggatgttttttaagaagaagaagttgtgtatgttttttatatgtttgtagatttgtgagttggagaagtgtttttattgttagaagtatttggttttggttgagtgtgttgttttggttaaggtgtttaaaatgattgatgtgtaggttaaaatttggttttagaattggtggataaagtggaggtgagtaagtggggtgggttggttgtttgtgagtggtgtggttttaggtagtttttggtttattggttttttgtggggtgtatatattttttttgtttgtggtttttgatttttttggaggagtgagtttttgttaggtttgtggggagttggaagtaattgaggttgatagttgggatggggttgaagagttttggttttgttttattggaggttttagggttttttggttggtatattttttgttggtgtagatgtggtaggtttattttgttgtttgggtaaataggtgggttagtgtattttatgtagtttaggttttagggatttgtgagttttggggagttttttgtttgtgtaaatttttgtttatggaattttgttttgttttggagattggatgtagaatagtttgtattttgttgtagtgttttagttgggtttttggtagagggtttgtggttttagattgtggttttgttgatggtttttttttttagatatttggtttttgtgtagttggtttttattttggaaggagaaaattaatttgtgttggttgtggtggggttttgtgggttttattggaaggggaattaattaggagtagatgggtgtgtgtgagaaagagaatttttttttttttatagttataattttagttattatgtaatgggttttttgttttgttttgtttttttatatttatgtttatggatgtgaagtgtttttaatatttttgagtagtttttttttttgtgtgtattgatgttttttttggttgtattttttggtatgttgtattttttggtatgttgtatttttttgtatatttggtttttgtttgttggagttttttttttagtttaggttttatggggtagtgtgggagagtttgggtgaagttggtggtgttgagatgggtg

SEQ ID NO: 139 - DNA, 4102 bp, Artificial Sequence
  chemically treated genomic DNA (Homo sapiens)
tgtttgttttggtgttgttgattttgtttagatttttttgtgttattttatggggtttgagttaggggagaaattttggtgggtaagggttagatgtgtgggagggtgtagtgtgttagagggtgtagtgtgttagagggtgtagttggagaaagtgttagtgtgtgtggagagggaggttgtttgagagtgttggggatgttttatgtttgtgagtgtaaatgtgaaaaaataaaataaaataaaaagtttattgtgtagtaattagagttgtggttatgggagaaggaaaatttttttttttatatatatttatttgtttttaattgattttttttttagtgggatttgtgaaattttgttgtagttggtgtggattgattttttttttttagggtagggattggttgtgtaaaggttgggtgtttgggggaggagattgttagtagggttgtggtttggggttatagattttttgttgggagtttggttggagtgttgtaataaggtgtgggttgttttgtatttagtttttaggatagagtaggattttataagtaagagtttgtgtaaataaaaagttttttaggatttatagatttttggagtttggattgtgtggagtgtattaatttgtttgtttgtttaagtggtggaatagatttgttgtgtttatattggtagagagtgtgttaattagaaagttttgaagtttttggtaaaatagagttagggttttttagttttattttagttattggttttggttgtttttagttttttgtaagtttagtgggagtttgtttttttgaaaggattagaaattgtgagtggaaaaagtatgtgtgttttatgagaggttaatgaattgagagttgtttgagattgtgttgtttgtgggtggttggtttgttttgtttgtttatttttattttgtttgttggttttggaattaggttttgatttgtgtattggttattttgagtgttttggttagggtggtgtgtttggttgaggttaggtatttttggtggtggaagtgtttttttagtttgtagatttgtaggtgtgtgaaggatgtgtgtggttttttttttttggggggtgtttggttttgataggggtgatttatatggtgtgttatagtgaagggtgagagggttattggagtgggagatagatagatggtagaggtaagtagtagagtgttaggaagtgttttaggtttaatattttgtgagttagtgagtgtagtagttgaatttttatgagtagggttgagatttttttgttagtttttagtgataagtttatggtgggaaatggtttttttttgtttgttagtttgatgttgttgttgttgttattatggaggtttttttggttttgggtttttgtgagtttaattatttttttgttgttttttttttaggggtagtttaaggtgagttaatggttatgtttttttttttttagttagttttaggtttttaggtttagagtaagaggttgagtttgattttggaatttgatttgagtttttatttatagtagtatatattaatataatgtataatgggggtaaatttatagatttatatatttaaataggattagataagtataggtatgggataagtatataggatatagagtaaaataaggttatagttatatatttgttgaaattgtttttatgtttgatatagtattagggttttgtggtaggttttaaattgagtattttttattagaggtttaggattagtggatttttggttgggtttttagtagggttttttaagattggtttggtttgggtggggaatgggatgggtattaggttttgttgttttaggttagagaaaatttaggttgggggtattgggatttttttagggagggttttttttgaggtttagatttaagtaattgttttttttttggatattagtttttatattatttttgttgtggttttagagtttggtaagaagttgtagaagtagtttttttggttgtgttgttgtttggaatagaagtaggaagttaggggtgttttggaattttttggtttagtatttagtttttagtagttttttttaagtagttatgtaaattttttttttattgttgggtttttgaattgggggatttttaggaggttttatttttgttagtagtagttagtgttttttgttttttttttttaagattggttggttaatttgggtttaatttgtggttgttttttagtttggatggaaggattgtggtttaggatttagggaattttaaggggagtagaaagtgagaatgggggaagggatttatgttagagggagagttgagtgtttagagtggaaatgggagtagagggagttagggttagtagaggaaggtgggagtgggtagtagagaaggtggtagtggttattatttagtatttaatgttttgggagtagtttttttgttattgattattagtttattggtgtattgtttgtgtttaagataatagggttgggtttggggtaggatatttagttgggagagaatgaaaatgaaaagttagttgttttgggtggttaagttttgttgttatttttttagatgaagtttgttttttggaaaaaaaaaaaaaggttattggttttgttgatttattggggtttagagtttttattggttttgtagtattatgggtattggagttaggggtgtgaagtgtatgtgtgtaggggattggaggtgggggaatttgttttttttttgtgtttgattttggggtttgttttttgggttttagaatagtagttaggatggaagaaattgtttatgttgtatttttttttttaagatttttaggttaagagtagttgtagaaggtggttttgaatttatggtttttttttttttgtttgatttggttagtggatttggagaggggattagggagagtttttttgagtaggggttttttgggagatagagaggggtttaggttgagagaattttttaagtatggtgagtttgtgttatagaattgggtgggtggtttaatttgggggaagtattaagaagagttgggtgatttggagtgtagaattggttttggggagttatttggtggggtaggggtagtatggagtttgggttgtggttaggtggggagtgtgtgggttggatttatttgtgaatttgttttttgtgtatttgtggttattttttatttaggggaaggtgaggttagtgaggttgttgatgtttggtatggtaggtatagagggtatggtgggtaagttggtggttaggggttgggggtgggttatggttttggtgagtggtttgtgtgttggtatttggattatttttgtagtgttgagtgttttggtattgttgttgttgttgttgttgttgttaggattggggttgtttgttaaggttatgtttatgttgtaggagttggttagaggatttatgttgtaggtgttgttgttgtttgttgggtttttggggttgttgggatttttagtattataggtttttgtttttttagtttttgttgtggttgtggagtttttgttgttgtaagtgtaggtgtttttgattaagtagttaaggttgtattttttgttttggaggtgtgaggtgggttttatgtagttattttggtttgggttgttgaggatttggttgatgttgaagttaatgggttttgtgtgatttgggtggaggtggtgtggatttaggtgttttatgttggttttggttttattggggggtttgggtggtggtgtttgttgtgtttggtttggggggtagttagtaggggttgggaggtaatagtggtttttggttgtgtggagatttggaagtgaagtgtgtagaaaggttaaagtagaagggggaggggagggagagagggggtgttgtattttttttttttttggtttttgtttttttgttttggttgtttgtttgttgttgattttgggatattaattattaggtgaaaaagtttggtgtaagagagttttgtggttttgattgggtttttttattggttgtgtgtggagaggagtggggtgaatgatagtgt

SEQ ID NO: 140 - DNA, 2337 bp, Artificial Sequence
  chemically treated genomic DNA (Homo sapiens)
ggatgatattaaaagttttattatttggttttttgttttggggtttttaaggagtaagggaaagttgtggtttttggtttgtgtttggttggtggttttatatttttttatttgaggttgattttttatttgaggttgatttgttatttgaggtgggaaggggtatttggagtttttagttgtagggtgagagatatttagtggttttattttttagtttttagagttataggttaggagtggagggttaaggttggtgaaaaaatttggttatgtggatgggttaaagattaggggttgttgtgaaggtgaggatagaaaagtgttgtagaggtttttagattatggttttgtttttgttagagagttttaggggttttagtggtttttttagtgttgtgtatatatgaggaaaggttagagaatgagagggatatagtatttttttattttttaagtttgtatggggagaagtggttgtgagttttagtattagggaaatgtagtgttggggtttgggtaggattgattgttttagtttttattttagttgtaattttttagttgaatagggtttgttttggtgggttagggtttttgtttttgttgaagaattttggtttaggaaagatggagaggttgggggttgaggagagaggaaaaaatggtaggggaggattggaggtgattgagtgttgagtttttatatttttattattgttgttgttgttgttattattattattattattattattattattattattattattgaagtattttatgtttagagttaagataagattataaatataatatatagaaaattaataaaatagaattttgtttttttttgaggtttttttttttatttttaggtagtatgtgttttttttagtggttttggggagggggtgggagagatgataggtttgggattagggagtttttaaggtttttgttgaggggatagtgaatttattattgaattgtgtatgggggatatggataaaatgagatgtgatagggataagagtattttgttttgtttttaggaaatattaagtgagtttgttttttagtttttattaggaagtttgattaggttgaggtgagttttttgggaaggaagggtgtgtgggatgttgggtgggtttgagtagtgaggttttagagtatttgttgggagttgtgtgggtgggggtgtttaggagagtgttgggttttgtttgtttgtgttggagagtaggttttttggtttttttatttgagagtttttttttttgggtttttttgatgtttgtggttttttataggtttttttttttgtgttttttttttttttttagtatttttatttggtttgttttttttttttttttttggtattgagttgagatgtgttgagtagtttgtttttttttttttattttatgtgttggttttggaattatattttgatttgtttttttgttaggtatagggtgtgtgtgattttgatgtgttgttgttgtgttaggtagtgattgtagtgaaattttttttttagttttagtgtttggtaatgtgtgtatgtttggtggttttgttggttgttgggtttaaaggaggaatttgttatgtagagtggagatgttgaggtttgtggttattgggtttaggatttttttttttagttgatttttgaatatagattttagttagtattgggatgttttttattttgttggttttttttttttgttttgtatttttttagtgttttttttagatttttttttagttttttaggtttgtgttgtttgtttagattttagatgggggaggggaggagtagtttgaatttttatttgagtttggggggaggggttggttaggtgtgtttttttttagttgtattttgtttttttttttttttttatttattttgtttttattttttgttatttttttaatttaatgataaatttaggttgttaatttgtaatgatgtagattgatttatagtttatattaatggttttttatttttgagtttggttaatggatattagttgggatttaaggttaataaataatttaatttgagattttgtgtttgttttttttttttttgttttgtttgtttttttttttttttttttttttatttttttttttttttttgattattattttttttttggtgttttattttgttttagttttttatttatagggaaatatagttttagatagatttaattttttttttttagtgttattttttatttttttgtatgatgtattttgtttttaatggagttgtttttggttggggaattttattagggt

SEQ ID NO: 141 - DNA, 2337 bp, Artificial Sequence
  chemically treated genomic DNA (Homo sapiens)
gttttggtagggttttttaattaaagatggttttattaaaaatggagtgtgttatgtaagggggtagggggtgatgttgaagaggaagagttgagtttgtttgggattgtgtttttttgtgggtggggagttggggtaagatgaggtattaggaaaggggtggtagttagaggagggaggaggaataaggggaaggaagagagagggagtaggtggagtgagagagggagaaataggtgtggggttttaggttggattatttgttggttttaagttttaattgatgtttattagttggatttgaaagtgaggagttgttaatgtggattatggattgatttatgttattatggattaatggtttggatttattattgggttggggggatgatggggggtgggaataagatggatggaaagggagggaaagataagatgtaattaggaagagatatatttgattagtttttttttttaggtttaggtgggagtttaaattgtttttttttttttttatttagagtttagatagatggtataggtttaggagattaggagggaatttggagggggtgttggaggagtgtgaaatgggggaagggagttggtagaatagagggtattttggtattggttggagtttgtgtttgagggttgattaggggagggggttttgggtttggtgattgtaggttttagtatttttattttgtgtaataggttttttttttgggtttagtggttggtgaggttgttagatatatatatgttattagatgttggagttggagaaggagttttattataattgttatttgatgtggtggtggtgtattgagattgtgtatgttttgtgtttgatggagaggtagattaagatatggttttagaattgatgtatgaagtggaaaaaggagagtaaattgtttagtgtgttttagtttagtgttgaggaggaggaagaaaaataggttgagtgaaggtgttggaaagggagggaggatgtgaggggaaaggtttgtggggagttatgggtgttagagagatttgggaaggaaggtttttgggtgggggagttaggagatttgttttttggtgtagataggtggggtttagtgtttttttggatgtttttgtttgtatagtttttggtgggtgttttgaggttttattatttgagtttatttagtattttgtgtgttttttttttttgaggaatttgttttagtttgattaggttttttggtgagaattgaggagtggatttatttgatgttttttggaagtagagtaaaatgtttttgtttttgttgtgttttattttgtttatgttttttgtgtatggtttaatggtagatttgttgtttttttagtgggggttttgaagattttttgattttagatttgttgttttttttattttttttttaaagttattggaaggagtatatattatttagaagtaagaagaggagttttagaagaaaataaagttttattttattaattttttatgtgttgtgtttgtagttttgttttagttttggatgtgaaatattttgatgatgatgatgatgatgatgatgataataataataataataataataataataataataataaagatgtgaaaatttgatgtttggttatttttaatttttttttgttatttttttttttttttttaatttttagtttttttattttttttgagttagaattttttagtaaaggtgagagttttggtttgttgaagtgagttttgtttgattgggaagttatagttgagataaaggttggagtgattagttttgtttaggttttagtgttgtgtttttttggtgttgaggtttatagttgtttttttttgtgtagatttgggggatggagaggtgttgtgttttttttattttttagtttttttttgtgtatatatagtattaagggagttattgaggtttttaaagttttttggtggagatggagttatagtttgggggtttttgtagtgtttttttgtttttatttttgtagtgatttttggtttttggtttgtttatatggttaggtttttttgttagttttggttttttgtttttggtttgtggttttggagattgaaaaatggggttattgggtattttttattttgtagttgaaggttttaggtgtttttttttattttaagtagtagattagttttaagtaggagattagttttaagtaggggaatgtaaagttattagttaggtataggttgaaggttataatttttttttgttttttggagattttagggtaggaggttaggtgatggggtttttagtgttattt

SEQ ID NO: 142 - DNA, 2351 bp, Artificial Sequence
  chemically treated genomic DNA (Homo sapiens)
tagttgggatgtattgttgttttttttgttattttagtagttgtttagagatgagatttagttttattgtgtttttttgggatttataagaatttttttttgggttgagggggtgttgttgtgggtgtattttatggagagttttaaggagttagggaggagttttttggtggtttgggttttggattggtgggtgttgggtgggtttttatggttgtttttggggttgttaggtttgtaaggtagataggtttttggatttgagtgtggttgtggatgagggtagtgttgttattagaggtgatgtttagggttattttttttgatttgtttttttttttttttgatttgttttttttttttgatgggtttgtttttgagtttgatatttgtttgggggtttttggtgaaggttgttggtttttagaatgtattatttttttttggtatgatgggaattatttgtgatattgttattattttgttgtaatttgggtagtagttgttatgattttattatgtgttttttgtgaggtttttatttgttattgagtggtagggatgtgtttttatatttttatgtgttattttgtaggtgttttttgttgatttttgtgtgttttggggtttgtttttttggtaggggttgattttgtttgtgatttagatagtttggagggttaggattgaggggagggggtggtggagtgaaggggagggtgggtgttgttggtaagaattataggtaaagagggtgttgggggtagggaaggtttggaggtttgaggagtagaaagtagatttttgattttttttgggttggtgagttggggtttagtttagagtgatagggattaaatttgggtttatgtgttgtgtttagtttggggtttaggttttttttttgtgagttgagtagatagggagggttttgggggaaggttgtgggtttttgggtggaagagttttgggtgaggtttttgaattggtaagtggggtagtggtggtagggggtttagggaagtggggttagttgggggtttttaggggttttttagggatatatttgttgttagggtgtggggagtgggaagtgggggatggggtggattttaggattttgggttgtgtttggttagagtggggaattggatgttttgtttttggtttagttttttttggttgtgattttgggggattattgattttattgtgtgtttggagagtttaatttttatttgttagtgggtgatatagaaggtaggaatgtagaaggttttttagaagtttttattggtttgtaaggtagaggttgttttttgttgaggatatatttgttttttttattttttagattggtggttgtttaaggagtttggtatagttgtatggaggtgtagtatttataggataagtggtggaatgttttggttgtttttggtgtaggtggtgggtggggttggggggttttgtagtttttttggttttggttttttggataggttttattttttttttattgtggtttttttggtaggttgtttgttattttaaagttatgttgttttgggtattttgttttttttggggattggggttggggttggggtagttgtgtttatgggtgtattttttgtgttgggtattgtgttgagtttaatatataggggtttggggaggtttgtgggtgtttaggttgagatgtgaattttgagtttgtgtaatttgagttttagagtggtggtttttgttttttataagatattgttttgtgagggggttagttttgaagttggatggtttggtttttgttattatgtggaggttttttgtaggtgtttgtgtagatgtttttgtgtggggatttgtttggttgatggattagggggaaggttttttttatggtgtgaggtagtattgagggttttgtgtttagtaggtttattgttggtagttgggtttggtttgataattgtggattggggtgataggttttgattttgtagagtaggattgtggaaaatggatattgatgttgtttggtggatttaggtagggttgggatgtttgtaggatttatgggataattagaatgattgggtttgattggtatagggatgtggattatggtgtttgttattagtagatataagttgtatgtagtgggttgtaggtgttttttgggttggaatatatggatgtttaggtgtggaatggtttggatagtagataataagtttttgttgtggttatttttgggtgtgggttgtgggttttaatttttttatttttgtttatttgaattttttaattaaaaatatattgttttttaaaaataataaaagattatt

SEQ ID NO: 143 - DNA, 2351 bp, Artificial Sequence
  chemically treated genomic DNA (Homo sapiens)
aatgattttttattatttttaaaaagtaatatatttttaattagaaaatttagatgagtaaaaatgaaaagattaaaatttatagtttatatttaggggtgattatgatgaaggtttgttatttgttgtttgggttattttatatttggatgtttatgtgttttggtttagggagtgtttgtggtttattgtgtatagtttgtatttgttgatggtaagtattgtagtttatatttttgtgttagttaggtttagttgttttaattgttttgtgggttttgtaaatattttggttttgtttggatttattgggtagtattagtgtttattttttatagttttgttttgtagagttagggtttgttattttggtttatggttattaaattagatttaattgttgatagtgagtttgttgggtatggagtttttggtgttgttttatattgtggggagaattttttttttgatttattagttaaataagtttttgtatgggggtatttatataagtatttatagggagtttttatgtggtagtgggggttgggttatttggttttagggttgatttttttgtagggtaatgttttgtgaggagtagaggttgttattttgaaatttgagttgtataaatttagggtttatattttggtttgggtatttatagatttttttgagtttttgtgtgttgagtttagtgtagtgtttagtatagggagtatatttataaatatagttgttttagttttagttttagtttttggaagaggtagggtgtttagggtagtgtgattttgaggtggtaggtagtttgttaaaggggttatgataagagggaggtggagtttgtttaggggattgaagttaggaaggttatagagttttttagttttgtttgttatttgtattaaggataattagaatattttattatttgttttgtgggtgttgtgtttttgtgtagttgtattaggttttttgagtagttgttgatttgggggatagagggggtaaatgtatttttagtagaaaatagtttttattttgtaggttagtgagaatttttgaaaggttttttgtatttttgttttttgtgttatttattggtaggtagggattaggttttttaggtatatagtaaagttaatggttttttaaggttatagttgggagaggttgagttagggatggagtgtttagttttttattttgattaagtataatttggaattttggaatttattttgttttttattttttattttttatattttgatagtaggtatatttttgaaggatttttgaggatttttgattggttttatttttttgggttttttgttgttgttgttttgtttattagtttaggggttttatttaagatttttttatttaagggtttatagtttttttttaagattttttttgtttgtttagtttatggggaagaaatttgaattttaggttgggtatggtatatggatttaggtttggtttttgttattttgggttgggttttgatttattagtttagggagggttaagggtttattttttgttttttaaatttttaggttttttttgtttttggtattttttttgtttgtggtttttgttagtagtgtttatttttttttttattttattgttttttttttttagttttggttttttaagttgtttaagttataggtagggttaatttttattaagagagtaggttttagggtatatagaagttagtagaaagtatttgtaggatggtgtatgggggtgtgggagtatgtttttgttatttagtaataggtgggggttttatggggggtatatggtgggattatgatagttgttgtttagattatagtgaggtggtggtaatgttataggtggtttttgttatgttaggaagagatggtgtattttagaaattagtggtttttgttgggagtttttaggtaggtgttaagtttaggagtaggtttgttagagagaggaggtaagttagaaggaggaggaggtaagttagagggggtggttttagatattgtttttgatggtgatgttgtttttgtttatagttatatttaagtttagaggtttgtttattttgtaggtttggtagttttaagaatagttatgaagatttatttagtatttattaatttagaatttaaattattagaaggtttttttttggttttttggggttttttatgagatatatttatagtaatgtttttttagtttagggaaggatttttgtgaattttagaaagatatagtggggttgggttttatttttggatagttgttgggatggtggaaggagtagtaatgtattttagttg

SEQ ID NO: 144 - DNA, 2473 bp, Artificial Sequence
  chemically treated genomic DNA (Homo sapiens)
ggatatttttgtgtgtgtatgaatgtatttgtatgtgtgttagttttttagtgtgggtgtattttttttatttttttaggtatgtgttgtgggggaagggttggtttaaaggtatgagttagaggaaggattgtatgttgtgaaggttttttttattttatgttgggtttttgtatttgtgttttagtttttttgttgaatttattaatgagatgttttttttgtagggattggttttgttattgagattttaggtttttgttagttattttttttttttatatttttagttatttttggtaggttttagttttggttttatttgtgtttttgttttagttgtagttatgttgtatattgagggttatgtttttttttgggtggtgggttagggtaagttatgtttggtttgtttgtttttggagggaggtgtttatgtgaatgagggtgatgtgtagggggagattgtgttaatggtagtttgttgggtttgttatgatgatttttagaataaggtatgtatggtatgttattttttggagtaaggtgtggattttaatattgtagattgattagggtgtatggtgtttatgtatgtttgtgttgggggtgggggtgttgtggtggttttgttgttttttgtttatggtgtagattttttagtttgagattatgtgggtgttttggtttttgtttatgttttggattgtggggattgtgagatttttgttatattgttggatgtttgtaaggttaagggtatggaggttattattattattattgatattttgtttttaggtattaagaagatttggtagtattttaattttttattatttttaggggtggaggattttgtttttgttttttttagtttggggttttgtatgttgtttttggaaatttaattgtagattgttggaggaggagggtgtgggatgttatttttttgtgtttaggaagaagaggagaagtgggatgtatttgaattttttttttttaagttttttgatgatttatttttttttgagttgttttttaaattattatgttattttttaaaattatttaaaaggtttaattttgagttttggggtttagtggtttttttttaattagttttatttattgaagggagattggggattgagtgtttgattgttgaatttaatggtttgattttgattggttgattttgttttttttgatgttatagtattgaaggttttgaggatttgtttttatgggtggagaaagtgattagtgggggtttttttttttgttgaaatatagtattagaagtttaggagtttggtttttttttagggttgaggtagaaattgagttgtatggagttagtggagttggatatttttggatatttttgttttgatttgtttgagtttagttgtttgtttttggagtgttgttgatatagtgtttttttgttgattttttttttagttggtttggttttttttttgtgttagttttaggagagtttgttaggggtagtatttttgttaagtggaaggaggtggagtttggggttgttggagtggaggggtttggggatgttgtttttggattatattttgtaaatgtggttgggttttttatttttttttaatgttagtttttatttttttatttttgatatttgtttataatttggaggttgggtgtttttgttgtttgtttttttttatgttggggtgttaggtttttttaggattaagtgtaaattggtgagatgttattttatgtagattgagtagatttgtttgttggggggtttttagagtttaggtgggtttggggagttagggtgttgagaggagtgagaggagttaaggagggtggggattaggattttaatgggataggtgggagaattagtttatatatatattatgaataaagggattttttgtatgtgtttatgggtgtatagtgtatttatatatggttaaatatgtgtttataagtatagtatttttattagtaagaaagaataagtattttatttattgggtatatatatatatgtatttatgttttggttattttatatgtatatgggattatttgtgtatttataggtatagtatattaataaatatatagggttagggttttaaatttttttgtatttgtttagaagtagtagggaatttttatttatgggtagtttttgatgtttttgtttttttgtagaagtaattttttgttttttatgtatgttttgaaatatagtttattatgattttgtatattttttttgtggatattttagtttattttgtaggttttgtttttttttttaggtttggttttttatttatattttgtttttaattttaattattttttaggatattttttttattttttttgggggtttttgtagtaatttttagttttagttttgttgttgtttttattgtttttaattttattttttaatttt

SEQ ID NO: 145 - DNA, 2473 bp, Artificial Sequence
  chemically treated genomic DNA (Homo sapiens)
gaagttgagaagtgaagttgagagtagtaaagatagtagtagaattgaggttgggggttgttgtaggaatttttaagaagagtgaaaaagatattttgaaaagtggttggggttagaagtagggtgtgaataaggagttaggtttggagaaagaagtaagatttgtagaatgggttgggatgtttatggagagagtgtgtaaaattatgataggttgtgttttagggtatatatggaaagtaagggattgtttttgtaggagggtaaagatattggagattgtttataagtaagggttttttattgtttttgaataaatgtaagagagtttgggattttagttttgtgtgtttattgatatgttgtgtttgtaggtatataagtaattttatatgtatgtgaaatgattagggtatgaatatatgtgtgtatatatttagtaaatagagtatttatttttttttgttaataagagtattgtgtttatggatatatgtttaattatgtgtgggtgtattgtgtatttatgagtatatgtaagagatttttttgtttgtggtgtgtgtgtgagttggtttttttatttattttattaaggttttaatttttattttttttggttttttttattttttttagtgttttggttttttaggtttatttagattttggaagttttttagtaggtggatttgtttagtttgtatggagtggtgttttattaatttgtgtttggttttgggagagtttggtgttttggtataaggaggggtaggtaatgaaggtgtttgatttttgggttgtgggtgaatgttagggatgggagggtggggattgatgttgagagggggtaggaaatttggttgtgtttgtgagatgtggtttaggagtaatgtttttgagtttttttgttttagtagttttggattttgtttttttttgtttagtggagatattgtttttggtagatttttttgggattggtgtggagagggagttgagttggttggagggagggttaatggggaggtgttgtattggtggtgttttagggataggtggttggatttaggtgagttagggtaaaggtgtttaggggtgtttagttttattggttttatgtggtttagtttttgttttagttttgaagggggattagatttttgagtttttggtgttgtgttttggtgagagagaggatttttgttagttattttttttgtttatgggggtgggtttttagggtttttggtgttgtgatgttgggaaagatggggttgattggttagggttaggttattgaatttggtagttaagtgtttgatttttggtttttttttagtgggtgggattggttgaggaggggttattaggttttagggtttggagttgagttttttgagtggttttgggggatggtgtggtggtttggggagtggtttggaaggggatgggttattggggggtttaggaagagggaatttaaatatgttttgtttttttttttttttttgggtgtgaggggataatattttatgttttttttttttagtggtttgtagttggatttttgaaggtgatgtgtagaattttgggttaggagaggtgggagtagggttttttatttttggggatggtggagaattgagatattgttgggtttttttggtgtttgagggtgaggtattggtggtgatgatgatgatttttgtatttttggttttgtaggtgtttagtagtgtggtaagggttttgtggtttttgtggtttagggtgtggataagagttgaggtgtttgtgtgattttggattgaggggtttgtgttgtgggtaaggagtagtgaggttattgtggtgtttttatttttggtgtaagtgtgtatgagtgttgtgtgttttaattggtttgtgatattggggtttgtgttttgttttaggaggtagtgtattatgtgtgttttgttttgggggttgttgtagtgggtttgataggttgttattagtgtagtttttttttgtgtattatttttatttatgtaggtgtttttttttagaagtaaatgggttaagtgtagtttattttgatttattgtttgaagaagagtgtggtttttggtgtgtaatatagttgtggttggggtgagggtatagatggagttgggattgagatttgttgaggatgattaggggtatggggagggggagtggttggtagaggtttgaggttttagtgatgaagttgatttttgtaagagagatattttattgatagatttggtaggaaaattgaggtatagatgtagggatttagtgtggggtggaggagatttttatggtatatagttttttttttaatttatgtttttgagttggttttttttttgtagtgtatgtttgaggaggtgggaagggtgtatttgtattgaaggattagtgtgtgtgtaaatgtgtttgtgtatgtgtagggatgttt

SEQ ID NO: 146 - DNA, 2425 bp, Artificial Sequence
  chemically treated genomic DNA (Homo sapiens)
gtttagttggaattagttaatttgtaaatatagtttttattttaaaaattgtgaaatgatgtttttttaaatggaaaaagtattaaggagaagaaaattgatttagttatagggtttttgggggaaaatttttagtattatttttttttttaattatagtaaaatatggtgggatataagaattaaatatttattgagtattttttttgtgtttattataattttattttaatttttgtaaatgtgattgtgattttgtgagttagattatagaatttttgttgatagttataattggtaggtatagaaagtgtaaagatggagtttggaatggaatttggtttgtttgattttaagttttggatttattgtaatatattataattgttagttttgtaaaatgttttttttttttttttatttatttttatatttaaattaaaatttagtaaattaaattttgagtagtagaaaaaattttagtaaaggtttttttatttttgaagaattttttatataaggatatttttttttgtttttttttttatgtagaattttattaaaggttagtaagaatgggttgttgtgtttttttttaaattttatatagaagtttttaattttgaggtaaatatttgaatggaataaatgagtatgatttgggggttaaggtaatttttaagtgtgtgtatgtgtgtgtttgttttaaggtataataaagtttagagattaaggttgagttaaaaaataaatgaggataaattaatgaggataaattagtttgttgaggtgtggttagagtagtagtaattgtggttgtttttttgataaaggttgtgaagatggtatgttttatttttatttgtgtattttttttgatattttatttttttatgaagttttagaggtgttttaaaattgtgttaggaaatatatagagataagaaaaggtaaatggttttgatttagtgttttagggaagaggttggaaaggaaatgtggtgtgagtggggtgggagagggggtttgtggttttgtttttgtttgggttgaagattgagtaaggtagggtttttttttttgtggatgggttttttttttattttattttttatttatttttggttttgtgtgtatgtgtgagatagtttagtgggtttatagataatgattattagagattaaagaaggaaagttagtgagtttgaatataggtgttttgtgtggaaatgtttaaggagattgttagaagtgtgtaagttggagttggttagagttttttttttattgagagggggagtttggtgtttttggttgggagtgatttggagtttttagttttgtgttttagttgttgttagtgttagttttggatttggtggattaggaagaggagggaggggggagagagtgtgaagagggaggggattgaagttggagggttttgagtttagtgttgtgttggtgtagagaaatttttttttttggttttggagatggtgttttggttgtgttggagtggagattgttaggtttggaggaattggtagttttttatgtttttgtttgaagtttgatttgattgttttttttagtgaggtatggagatttatttaggtttttttttggttgtgaatttaggttttttttaggtagtgtggaattgtttagaagttgatattttgaggggtggtgggggtggatagttttggttattagtgtttgggaaggagggtgtggggttgtgtgtagttgttggttagtaggttgtaaaaaattaggatagttaaatgtttagggagttgtttagtattaaaggaggttaagatttgttgatgtttgttatggtagtgtttgagaaatgattgggggagtttagtgaggttggggatgtagtggtttttgggttttagaaatttttttagttttttgtggtaattttggtttggtggtggggggttggtgagtaggaattggagggaggtggtggggaaattgtggatttgtttggttgagggtgtgtggattagattgggttgagtaggtaagttattgttgggttatagtgaggtgatttaggagtgaatttttagggtagttttttttttgttggtgttgggagagaatgtgggtatgggggtggggaggtgtgaagttttgaggttgggttgtggatattttaaagtttagagttgggagggtttaaaggaaggggtggtgtttatatggttatttttttgttgtgtgggttaagtagttttttttggagggtgtaaggtgtggtgggggtgatgagtttttgggtttttgttttgattgttaaatttgtttggttgggtttatttttttgtggttttatttgttatatggattagaatttggagtaggtagttttttttattttgaggtttttgtggttgttgtg

SEQ ID NO: 147 - DNA, 2425 bp, Artificial Sequence
  chemically treated genomic DNA (Homo sapiens)
tgtggtagttgtaggagttttagaatagagagaattgtttgttttggattttgatttgtgtggtgagtgaggttatgagaaggtggatttggttaagtgaatttagtagttggagtgagaatttaagggtttattatttttgttgtgttttgtgttttttagaagaagttatttgatttgtgtagtagaagggtaattatgtggatgttgtttttttttttgggtttttttagttttgagttttaaagtatttgtggtttggttttggagttttgtgtttttttatttttatgtttatatttttttttagtgttaataaaagggaggttgttttggaagtttgtttttgggttgttttgttgtgatttgatgatgatttgtttgtttagtttagtttgatttatgtatttttagttggatggatttatggtttttttattgtttttttttagtttttgtttattggttttttgttgttggattaaagttattataaaaggttaaggaggtttttggagtttggagattgttgtgtttttgattttgttggatttttttagttattttttaagtgttgttatagtaggtgttaataggttttagttttttttagtgttggatgattttttgagtatttagttgttttaattttttataatttgttggttagtggttatgtgtagttttgtgtttttttttttgggtattggtggttggagttgtttatttttattgttttttgggatattagtttttaagtgattttatgttatttggagggagtttgggtttgtagttagggaagagtttagataaatttttgtattttattgagagaggtagttgggttaggttttgggtaggggtgtggagagttgttggtttttttgagtttggtgatttttattttggtatggttggggtgttgtttttgaggttgagagggaaagtttttttatgttaatatggtgttggatttgggattttttagttttggttttttttttttttgtgttttttttttttttttttttttttttaatttgttgaatttaaaattggtgttggtggtagttgggatgtggggttggggattttgggttgtttttggttgggaatgttgggtttttttttttggtgagaaggaaattttagttgattttggtttgtgtatttttggtggtttttttggatatttttatatgggatgtttgtgtttaagtttgttgattttttttttttaatttttgatggttgttatttgtgggtttattggattattttgtgtgtgtatgtggaattggaggtgggtggagggtggaatgagagagaaatttatttgtagaaggaggggttttattttatttagtttttagtttggatagaagtaaaattataggtttttttttttattttatttgtgttgtgttttttttttagttttttttttgagatattagattaggattatttgtttttttttatttttgtgtgttttttaatataattttaaaatatttttgaggttttatagaggggtaaagtgttaaaagaaatatatgaataagagtaaaatgtgttgtttttatagtttttattaagaaagtagttatagttgttgttgttttggttgtattttagtggattggtttgtttttattggtttgtttttatttgttttttaatttggttttaatttttggattttgttatgttttaaaatagatatatatatatatatatttgaaaattgttttaatttttagattatatttatttgttttatttagatgtttattttggaattaaggatttttgtataggatttgagagaaaatataatagtttatttttattgatttttggtaaagttttgtgtgggaaagggagtaagaaggagtatttttatataagaagttttttaaggatgagaggatttttattaaaattttttttgttgtttagaatttagtttattaaattttagtttgagtgtgaaaatagatgagaaaaggaaaaaggtattttgtaaagttagtagttataatgtattatagtggatttagggtttagagttagataggttagattttattttaaattttatttttatgttttttgtgtttattaattataattgttaataggaattttataatttagtttatggagttatagttatatttataggagttaaaatagagttgtgataggtgtagagaaaatatttaataaatatttggtttttatattttattatgttttattgtaattaggagagagggtggtgttagaaatttttttttaaagattttgtaattgaattagtttttttttttttaatgttttttttatttaaaaaggtattattttataatttttgaaatggaaattatgtttatagattaattagttttagttgaat

SEQ ID NO: 148 - DNA, 2821 bp, Artificial Sequence
  chemically treated genomic DNA (Homo sapiens)
tttaggggataatatttaggtatgttaatggagtttaaaatgttaaggaaattatattataattttgtttagtatattataggttgttaaattgaaatgttatgttagttaggagtgtagtaatttttattttttggttttatttaattaggaagttttagtagagtgaagtttgttaagtgtttgttgttagaatttgaaggaatttgagtgagtaagaagagtgtttgatttattttatagaagtttgtttagaaatggaggagttagtgtttattgaagttggttttgtttttggtttgtttatatggagtttgattagttttagttatgtttattttggtttgggagatttgtaaagtgtttttttttttaatttttttgtattattttgaagtttagggaagtaaagagaggggtatatttggattgtaaaattaatgttttttgttgtttaggagagaagggaatgagagagagagagagatagatagatagagagagagagagagagagagagagagagagagagagagagagagaaattttattgaaatttagtttttttagaatttgtgtgatttggtttttaatgggagattagtgtgattttatggtatttttgttaggaattagtgatttttttgtagttattatttgatttattgtttttttgtttatttttttttataaagttattttttttttattttagtaagatttttttttttaatgatgataaagtttttgttttagtgttttttttaggattggtgtttttttaaaatagtgaatttagaaaattattttgtttaatattttttaaaatttttgtagttttaatgtaagtgtaagtatgtaaaggttttttgttatatttgtattttttgtttattttagaattattttttatttttgggtttgtaatagttttttttgtttttttggatagaggtgggtggtattaggggtttagggtagtaggaggtgaggggttgaggaggtgtgttagggtaggttggtttgtgttggatatgtgtgtttttttgtggagttaaagggttggggatgggggttttggatttattagagtaattttagttggtgggtgtttggtagttatttaaggaggtagggaaagtagtgagttttattgggtgggttatgatgagtagtatgatgggtagtagtagtagttagtaaaagtttttgtaaagtgtttagttgttgtattgttgtggggatttttatagtattatgattagtttgtgtaattttgtagtagtaaatggtttttgaggaatataggattgtgggggttgggtagtgggttattgagtattttgtggatggtggtagtagaggtggtggtggtggtagtggtatttggtggggaagtagtagttaaatttgtgtatgattttgagagttttagtaatatttagggattgggtttagttttggagtgagagggttgtttgttgagaagttgtgttggagatgtgggaagttgttgttataaggagggagttttgggaagttggaggataggaggagatgggagtttaggggtagatgagtggagtttgaggaggtagggtggagggagagttaaggtgttttgtagtttggtagttgttttttgagttttgttgtttgtatttttttggtgtttgggaagtagtaggtttttagtttgtttggggttatgtgggaagaggtagttgggttttgattggtggagtaggatgtaggttttgggagggaggggttgatgaggaggtgtaaggatgtaaggaggaggtggttgtggaagttatagatgggtttgtttgttaggtgttggtttgagtggggttaggtggggatggtttaaatgagaagtttgggttttagggtgggttatttgtatatttatatattatttgttttattttttgttttaggatgttttttattgaaggtggggtttggattagtgttttttttttgtgtgtgattttgggttgtgagtgtgggttgtggttgggtggtgtttttttgagttggagatggtgggggtggaggtgttagaggagtagtagtagtagggtagagaggggtgagttggtgtgggagagggtgttttgttggtgattggtgttttagtgtgtgggagtgtgttgtttaggttgtagggggatgtaggttgggaatgttgtggtggagaggttagggatgtttttttagggatttataggaaagagggtgagaggtgatggtgttagaattgtttttgttgatttggaagtaatagtagtattttttataagagtgtgtaattttaaggttgtttgttgaggtagtttagttattttggtaggtgttttttttttttttttttttttttttttttttttttaggttttttgtagttttgatttagtttaagtgtttgtaggtttgaatttttttttttattatttgtttttttttagtttgtagtttattagtgtgtttatttgggaggtgtggttagatgtgtttggaaggttagattggttgggataagtggtttgagagaaagagaaaggtttttttgtatatgttgtgggtgggttgttgggagtattggttgggtagtggtgtttgggaaggggagagtgggttttatttgttggtttaggtagtgattttgtgttttttatttgggtttttgttggatggttggtgatttggggtgatgagagaaggtttaatttggtaggagtttttggttttgtgtgttttttttattttttttagtgggaagggtaaatggtatagtgggatttgttttttg

SEQ ID NO: 149 - DNA, 2821 bp, Artificial Sequence
  chemically treated genomic DNA (Homo sapiens)
tggaaggtgggttttgttatgttgtttgttttttttgttggagagaatgaaagaaatgtgtagagttagagatttttgttgagttagatttttttttgttgttttaggttattggttatttggtaaagatttgagtaaggaatgtagggttattgtttgggttaataaatggagtttgtttttttttttttggatgttgttgtttggttgatgtttttggtaatttatttgtggtgtatgtagaggagttttttttttttttttagattatttgttttgattaatttgattttttaaatatatttgattgtattttttaggtggatatattaataggttatgggttggagaggagtgggtgatgaggagagggatttaaatttgtgaatgtttgggttgggttggagttgtggggggtttgggaggagagaggggagaagagagaaggaaggagagtgtttgttgggatggttgagttgttttggtgagtagttttggggttgtatgtttttgtgggagatgttgttgttgtttttaggttggtaagagtggttttaatattattgttttttatttttttttttgtaaatttttagagaaatgtttttggtttttttgttgtgatatttttagtttgtatttttttatagtttaggtggtgtgtttttgtatgttggagtgttggttgttagtaggatgtttttttttgtgttgatttgtttttttttgttttgttgttgttgtttttttgatatttttgtttttattatttttagtttggagagatgttatttagttgtggtttgtatttgtggtttggggttatgtgtggaagaggggtgttagtttggattttgtttttggtagggggtgttttggagtggagagtgaggtgaatggtatatgagtgtgtgggtagtttattttgaagtttgagttttttatttgagttatttttgtttagttttatttgggttagtgtttggtgagtgagtttatttgtggtttttgtggttgttttttttttgtatttttgtatttttttgttgattttttttttttgggatttgtattttgttttattaattagagtttgattgtttttttttatgtgattttgggtgggttgaggatttgttgttttttaaatgttagagggatgtgggtggtagagtttgagaggtggttgttgggttgtggggtgttttgattttttttttattttgtttttttgggttttatttgtttgtttttggatttttgtttttttttgttttttggttttttagagttttttttttatggtagtagttttttgtgtttttggtgtagttttttagtggatgatttttttgttttggggttgagtttagtttttggatgttgttgaaatttttgagattatgtgtgggtttggttgttgtttttttgttgggtgttattgttattgttgttgtttttgttgttgttgtttgtgggatgtttagtagtttgttgtttggtttttgtgattttgtgttttttggaagttgtttgttgttgtagagttgtatgaattagttatggtgttgtgggagtttttgtggtagtgtagtagttggatattttgtgagggtttttgttggttgttgttgttgtttgttatgttatttattgtagtttgtttggtgaagtttgttgttttttttatttttttaagtgattgttaaatgtttattggttggaattgttttggtaagtttagaatttttgtttttgattttttaattttgtagaagaatatgtgtatttagtatagattagtttattttagtgtgtttttttagttttttattttttattgttttagatttttaatattatttatttttatttagagaaataaggggaattgttgtaggtttgggggtgaggggtggttttgggatgggtagaaagtgtaggtgtagtaggaaatttttgtatgtttgtgtttatattggagttgtgaggattttgagaaatattaaatgggatggttttttgggtttattgttttgaaagagtattaattttaggggaaatattgaaatagaagttttgttattattaaagaaaaaagttttattaggatgaggaagaaataattttatgagaaagaatgagtgagaaagtaataaattaaatggtgattgtaggggaattgttgatttttggtaaaggtgttatgaggttgtattggttttttgttgaagattaggttatatagattttagaggagttgggttttaatagaatttttttttttttttttttttttttttttttttttttttttttttttttatttatttattttttttttttttttattttttttttttttaggtggtaaaagatattggttttgtagtttagatatgtttttttttttgtttttttaagttttaaggtagtataggggagttgagaaaaagaatattttgtgggttttttaggttggagtgggtatgattgaggttggttaggttttatgtaggtgagttgagggtggaattgattttagtgggtgttgatttttttatttttggataggtttttgtggagtgggttaggtattttttttgtttgtttgggtttttttagattttgatggtgaatgtttggtaggttttgttttgttgaagttttttaattaaatagggttagaggatgggagttgttgtatttttagttggtatagtattttggtttgatagtttgtagtatattgggtagaattgtggtgtaatttttttggtattttaaattttgttaatatgtttgggtattgttttttagg

SEQ ID NO: 150 - DNA, 3190 bp, Artificial Sequence
  chemically treated genomic DNA (Homo sapiens)
gggttggtgggtattgagttggggttattatgtttttttagagtgtttgtggaggtggtgaaggtttggagagtatatgaggtggaatttggattgagtgagttttttgagttgtttgtgtgggatgtagggagagggtgaataatgtttttaggtgttgaatgtaggggtaaggagttagtgagggtggttggagtaggttttgttagttgttattaagtttttttataggtttgggggtttggggttttttggaaagatttttttgttgtgttgattagtatggggtttgtttttgtattttgaaggttgttgtggttttttgttatttataattaagtttaagattaaggttgtaagttgaggttggggtattgataatgggaatgaagttataggggaagaggataattgggatgggttggatttatatttgatatttgggaaatttttagagtgtgtggtgtttttgttagtggtagttattggtggagttgaggttattgttattgttgttgttggtgttttgtttttggaattttttagtaagatggtatttattgtttgtttttttttgattagtatttttagttgtgtttttttttttttgggatatgtattagttatatattgtggggagaagatgggttatgtaaatgtaagttaatgtgtttttttagttatttttgtataatgtaataggaatagtgatttgtgtgtatgaattgggtagtgtgtgtgtgtgtgtgtttgtgtgtgtgagtgtgtgtgttagtgtgtgtttttgtgtgggtgtgtgtttgggtggatttttgtgtggtttgggaggtaaattgggtgtttttttaagttgttttaatatgatttaggtttttaaatatgtgaaagtggtagatataatagggatgtgaaggaaataaaaaataattggggaagtggtgttaagttatttaggttttgaattgaggatgagtagtgtggttgtgtttggggtgtgtttggaaattatttttagtttgtggtggttattgttttatttaaatttttttgtggggagagttgagtggatttttggggggttggttttgggttagttttaaattttttggttgtattttgtgtggttttattgatggtgtgttttggtgtagtttttggtgtgggtttgtttttttttttttgtttagatttagttttattggatttgttataatatgatagtaatttattggaggtaggaagagtagtatgaaataagatgagaaaattaaaaatatttttttttttttaaatagagatgtgtatttagttttttttatttgtttgtttgttttttatattattttttaatttttggaaagagattgtgaagtggaaatgttgtttgtatagaaattaggttttttagttgttaagattgttttttaatttttaggttgaatttttttttgtttgttgtaatttatggggaaatttaataatgtttttgttagaagtagttaggttgaaggaagaaagtgggggtgtttaaattaattttattaaattttggattatttttttagttaaagttatttaaggtggtttaggatgagggaattagtgatggggtgaggagtggggggtatattattaaggttgtttgtatttgaaataatgttattttggttgagaggtttgttgtattttattttttaattttatattttgattattttttagtgtttaagtaatagatttttttttttggtagtatattattaagtaggtatggggaattttttttttagggtttagatggtgatattatttttaaggattggtggtaggaatggtatgtgttgggtagatagagagaaggttagggtggtatttgttgggttagttaggtgttttttaattttttttagagaggatagggttaaaagttaagtttgattttgttttttggaaattattgggtagtagttgtgttttttaagtattttttaaattagaaaagtaggagggattttgggagagagggagggaatgagggagggagagaaagagggttttaggagtggagtgtgttagagtgtgagggatggagggagaggaggagtgtgggagttgtggaggtgattttgtgaatttattattgtaaatatatttgggggtgttaggaggggtaggggtgggggttgtggtgtttatattagtttggttgtgttggattgaggtagtagtgtggtttgagtagtttttagatttatgttgggtgggtgtagtatttggagtgagttttgtgtttgtttttgtgtagtgttgtatgtttggttttgagttgtttgtatatatgtgttggaggagagtttgtttagtttttttgttgagttttgggattttttaaatttgaggagttttggtgttgtggggtagttttttgttgttttttttgtttgttgtattttttttggggtttgttggtttggtgaagtggagagggggaggtggaggaggagagaaggtgggggttgtggtggttgaagttaagagaaagtggtatgtttgaattttggaggtggtggtggtggaggatgggggaagatgatgttgtagttttgtaggggatgtaggtgagagtaagtgaggtgagttgggtgttttggttttggtttgttgtggggaggtgtgtgttgttttgaggttttggtttttgtatttttgtgttttgatgttgtgggtgatagggtttggttttagtagttgttgttgttgttgttgttgttatttggaggatttagtaaaagtttggatttgggggagggtgtggtgttgagtgggattattattagggttggaaggagattttgagaatttttgtaggtaatgtgtgtttttaattttttttttttatgttttgttgttgtgtttttgtttttttttagagttttttttggtttttgtgggtttggtagaaagtaagagggaggtgaagtttaagattttggggatgagtattgagtgttggtagattattagttatgttagaggggtagttgtgttgagaggtaaatttttttaggagtgggtgagaatttttagttttagttggtgttttattttgtagttttttggaaatttggaatgtgaatttaggggtttttagtattttttagtttagagaaatggtttatggattttattt

SEQ ID NO: 151 - DNA, 3190 bp, Artificial Sequence
  chemically treated genomic DNA (Homo sapiens)
aagtgaaatttatgaattatttttttggattgaagaatattaaaagtttttggatttatgttttaaatttttaaagagttataagatgaggtattagttggggttgagggtttttatttatttttgggggaatttgttttttagtatagttgtttttttaatgtgattagtgatttgttagtgtttggtgtttatttttgggattttgaattttgttttttttttattttttgttagatttgtgagggttaggaagggttttgggaggaagtgggagtgtagtggtggggtatggaagaagagggttgggggtgtgtgttatttgtaaaggtttttgaggtttttttttagttttggtggtaattttgtttagtgttgtgtttttttttagatttaaatttttgttgggttttttgggtggtggtggtggtgatggtggtggttgttggagttaagttttgttgtttgtagtgttggggtgtgggggtgtggaggttggagttttagagtggtgtgtgtttttttgtagtgggttggggttggggtgtttagtttgttttgtttgtttttgtttatgttttttatggagttgtggtattgtttttttttgttttttgttattattgtttttagggtttgggtatgttatttttttttggttttggttgttgtgatttttgttttttttttttttttgtttttttttttttgttttgttaagttaatgaattttaaaagaagtatagtgagtggggaaggtggtagaaagttgttttgtggtgttggagttttttggatttggaggattttgggatttggtgggagagttaggtgggtttttttttgatgtgtgtgtgtggatagtttggagttgggtgtgtggtgttgtgtgggggtgggtgtagggtttgttttaagtgttgtgtttgtttggtgtgggtttggaggttgtttagattatattattgttttaatttgatgtggttgggttaatgtaggtgttgtggtttttatttttattttttttgatatttttggatatgtttatagtaatgaatttgtgggattgtttttgtagtttttgtgttttttttttttttttgttttttgtgttttggtgtgttttgtttttggagtttttttttttttttttttttatttttttttttttttttggagttttttttatttttttggtttaaagaatgtttgggaggtgtggttgttatttagtgatttttaagaggtaaagttagatttggtttttaattttgttttttttgaaaagagttgaagagtgtttggttaatttggtagatgttattttgattttttttttatttatttggtatatgttgtttttattattagtttttagggataatgttattatttgaattttgaaaggagaattttttatatttgtttaatggtgtattgttaagagggaggatttattatttagatattgagaaatgattgaaatgtgagattagagggtaaaatatagtaaattttttaattaaaatggtgttattttaaatgtaggtaattttggtgatgtgttttttattttttattttattattagtttttttattttggattattttaaatgattttaattgggggagtaatttaaaatttaataggattaatttaaatatttttattttttttttttaatttggttgtttttggtaagagtgttgttaaatttttttatagattgtagtggataaagaaagatttagtttaaagattaggaaatagttttgatagttaagaagtttgatttttgtataggtaatgtttttattttgtagtttttttttaaaggttaaagggtaatgtaaaaaataaataaataagtaaaaaaagttaggtgtatgtttttatttaggaaggaggagatgtttttggtttttttattttattttgtgttgttttttttgtttttagtaagttgttgttatgttgtaataagtttggtgaggttgaatttgaatagaagagggagaatgagtttgtgttaagagttatgttgagatgtgttgttggtggggttatgtgagatgtaattggagagtttaaaattagtttaggattaattttttagggatttgtttaattttttttgtagaagagtttaagtggggtagtggttgttataggttgaggatgatttttggatgtgttttaggtgtgattgtattatttgtttttagtttaaagtttgagtgatttggtattatttttttaattgttttttattttttttgtatttttgttgtgtttattgtttttatgtatttgagagtttaaattatgttaagatgatttggagaaatgtttgatttgttttttaagttatgtaaggatttatttagatgtatgtttgtgtggagatgtatgttggtatatgtgtttatatatgtgagtatatatatgtgtatattatttggtttgtgtgtgtgggttgttgtttttgttgtattatgtaaaggtggttgggaaagtgtgttgatttatatttatatagtttattttttttttatagtatgtgattaatatgtattttggggaggagggagtgtggttgggggtgttaattggaagggaatagatagtgagtgttattttgttgggaggttttagaagtaaagtgttaatgatgatagtagtggtggttttagttttattagtaattgttgttggtaggagtattatatgttttaggagttttttgggtattaagtatgggtttagtttgttttagttattttttttttttatggttttatttttgttgttagtattttgattttagtttgtaattttgattttgggtttgattataaatgatgaaagattgtggtagtttttaaagtgtgggagtgagttttgtattggttagtgtggtggagggatttttttaggaggttttaagtttttaagtttgtggagagatttggtaatagttggtaaggtttgttttagttatttttgttggttttttgtttttgtatttagtgtttgagggtgttatttgttttttttttgtgttttatgtaagtggtttaaggaatttatttgatttggattttgttttgtatgttttttaagtttttgttatttttgtaggtgttttagaaaggtgtgatggttttagtttagtgtttgttagttt

SEQ ID NO: 152 - DNA, 2308 bp, Artificial Sequence
  chemically treated genomic DNA (Homo sapiens)
taagggttaagtaatgatgtataaatggggtttattgtttaaatttatagaaagtaaaatgtggaaaattagtaattttaattgatagtgtatatttaaagaatttatattggttgggtgtggtggtttatgtttgtaattttagtattttgggaggttgaggtgggaggattatttgaggttaagagattgagattagtttgattaatatggtgaaattttgtttttattgaaaatataaaaaaattagttaggtgtggtggtatatgtttgtagttttagttatttgggagggtgaggtaggagaattgtttgaatttaggagatagaggttgtagtgagttgagattgtgttattgtatttgtttgggagatagagtgagattttgttttaaaataaaaaataaataaaaagaatttatttaatagaattaagtattaatataataaatatgaagaattttagatttttggtttttaaaaaatatataaagatgatatttttttaaaatatttttataaaatatattgagattgtgatgttttatattgattgtatgaaaataatgaaaaagaattagtattgttttattataaaagttttattaatgtaaatttataaatttttttttaaatattttgagttaattttaattttatgatagaaatttattatttttagtaaaaatagttggtatttgggaaattaaaggtttaaaaattaagaatagtaattaaagaaatttgataaaatagtttttttaaaatttttatttatattataaggggaaattttgattatgtttttttttttttattaattgtagaatttaatattaaggattatataattttatatttttttttgagaaaaagtaaaggttttgtgttgtagtaataatgtaagatatggagggaagttttatttaagatttttttgtttgttttttttttaaagttattttagaatattagggagggttgagaggtaaggtatgaagggtgtaatatttaatatgagtaatgtgtgtgatgtatttggttaaaatgtatatagaggatttgtttttgtttttagatagaagttttttgttttgtagttatgagggttaattgttgaggttttatagttttttttttttttatatttggattgttatgttttttatttattattttgatgtagaggtagatttaggatttttgtatttgttaaggattttttggtaagtttatggggtgggagtggttataagatggagtttgtttggttttggtttttttggtttatataagtttgttttttttttaatttttaatttttatagttttttatttttttatttttgatttattttgtgttattgatgtttttggtttttgtttgtagtaagtttatttttattattattttttgtataaaagtttgtatttattaggttaaagaggggaattaatgtttgtaggaattgttttattgaattgtttggttgtgttttttgttagattttatttgttgttgtggattgtatataattatttttggtatgttttgtgtatgtattattttttttattttgttttttttttgtttaaatatgtgatttttttttgtttttgtttatgtttatttttgtttttttatttttttttaggaaggaggagggagttgggggtgttaaaagtgtagtgattttttttttttttttgtttttgtttttgtattttttgttataatgttttttgggttgttagtgttttgatgttttttgggaaaatagtttatttttttttttttttttttttttgtttttaattaattagttatttgttagagagggatatgtgtagtgagtgttttttgttttttttatttgaatttttttttttttttaagtagagagattttagtagtagtagtagttgatgatgaagagagaggtagtggtagagggggggtattttttatttttatttttaaagggataggatattaattttattttattttaattttgaatttaggggggtggggggaaggtggttgagtttttttttttattttttagttttgagttttgagagggggattgagtttgagagaggagaaggagtttttttttttttgaaaatttttatttatgatttttatttttttatttttttaatttgtttttttttttttattttttttttttttggttgtgagaggaggagagaaagaaattaaaagttttttagtaatatagattttttgttgttgttgttgttgttgttgttgttgttgttgttgttgttgttattgttg

SEQ ID NO: 153 - DNA, 2308 bp, Artificial Sequence
  chemically treated genomic DNA (Homo sapiens)
tagtagtagtagtagtagtagtaatagtagtagtagtagtaatagtagtagtaaagggtttgtgttgttaagaggtttttggttttttttttttttttttttatggttaaagaggaggagggtggagggagggaggtgagttggaggggtgagggggtaggagttgtggatgggggtttttgaagaagaagaaattttttttttttttttaggtttaattttttttttagggtttagggttggagggtgggggaaggaatttagttgttttttttttatttttttgaatttaaggttgaagtggggtagaattagtgttttgtttttttaaaaatagaaataaaaggtgttttttttttgttattgtttttttttttattattagttgttgttgttgttggggtttttttgtttgggggggagggggggtttgggtagaagagatgggaggtatttattgtgtatgtttttttttgatgggtggttggttggttgaaggtaggaggagggggaggggaggaaatgagttatttttttagaaggtgttgaggtgttagtgatttggaagatattgtagtgggaggtataggagtgggggtggggaggaggaggaagttgttatgtttttaatatttttagttttttttttttttttaagggaaagtggaggaatggaagtgggtgtggatggagatgaaaggaggttatgtgtttgggtgggagaggggtggggtgggagaggtagtgtgtgtgtggggtatgttgggagtggttgtgtatggtttgtagtggtaggtgaagtttagtagaggatgtggttaggtgatttggtgaagtgatttttgtaggtgttggtttttttttttgatttggtaaatgtaggtttttatgtgagaggtaatggtgggggtaaatttgttgtaaatgaaggttaggggtgttggtggtgtaaggtgaattgaaagtgggaggatggaaggttgtggagattgggaattgggaagggggtaggtttgtataggttgggaaggttaggattaggtgagttttgttttgtggttatttttgttttgtgagtttgttgaggaatttttgataagtgtagggattttgagtttatttttgtattggggtagtaggtgaggagtgtgatggtttgagtgtaagagagaagggaattgtgaagttttagtaattgatttttatgattgtaggatggaggatttttatttagggatagagataagttttttgtatgtattttgattagatgtattatatgtgttgtttatattggatattgtgttttttatgttttattttttaattttttttggtattttggagtggttttggggaaggagtaggtagggaagttttgagtggagtttttttttatgttttgtgttgttgttataatataaagtttttgtttttttttggagagggatgtgggattgtgtagtttttaatgttgagttttatgattgatgaaggagaagggatgtgattaaagtttttttttatagtgtagatgagagttttaaaaggattgttttgttaagtttttttggttattatttttagtttttgagtttttggttttttaaatgttagttgtttttgttgaaaataatgaatttttattataaaattagaattaatttaaaatatttaagaaaggatttataaatttatattagtaaagtttttatagtgaaatagtgttggtttttttttattgtttttatataattaatataaagtattatagttttaatatgttttgtaaagatattttgaaggaatattatttttgtatgttttttaaaaattaagaatttaaaattttttgtatttattatgttggtatttaattttgttgggtgggttttttttgtttgttttttgttttgagatggagttttgttttgttttttagatgagtgtagtggtgtgattttggtttattgtaatttttgttttttgggtttaagtagtttttttgttttatttttttgagtagttgaaattataggtatgtgttattatgtttggttaatttttttgtgtttttagtagggatggggttttattatgttggttaggttggttttgattttttgattttaaatgatttttttgttttggttttttaaagtgttgggattataggtgtgagttattgtgtttggttggtgtaggttttttaggtgtatattattagttaaagttattaattttttatgttttgttttttgtaagtttgggtagtggattttgtttatgtattattgtttagttttta

SEQ ID NO: 154 - DNA, 2441 bp, Artificial Sequence
  chemically treated genomic DNA (Homo sapiens)
ttgatatggttttgatgttagaggagaaatatggtttgggggtttttgttaatttaggttttttaggtttttattattgtggggtttttggtattatgttttttagtatttttgatgttggttttgatttggaaatgttgtgtgtgtttaggtttttggtggagagagaagtagtttttgagggatttgtttttgagagggttttatttagggagtgattgatgtttaggtgtggttaggtttattgttttttgtttttgtttttttttgtttgtgttttggtggttgaggatttagtaggtttttttatgtttgttttttttatgttgagtgagttgggtggttggggtttgaggtgtgattaggtagttttgatttttatatgttttagaagggttggtatttagttagggagttgttgttttttttgtatggagtaaaagtaaatgtttttttttatttgttaggtttttgttggagttttttttatgtagtgatagaaagagttattgtgggtgttttttttagtgagtgtttaaagatgatggtggggtgggtgggtttggggttgatttttttttttagtttttttgaggggtttatggttggtgataagtgagtggtggtgtttgggtattggttggttgggggattttgattagtgtggttttaggatttttattttgtatttagtttgtattaggtagtgtttagttgtttttatgtttattttggttaaatttgttgttttaggtgatttagattgtggggggataggtaatggggatgagattgggttttatagtttttttattgtagtagtatagtttttgggagttgttgagatgtatatatggtttatttagatttgagttaatttttatttaggatagttttgagatttatgttttttggaagtttgtgaagttttgtgttatggtgtggtaagaggatagttagttagatttgtttagtttattttagggttgtgtgggggtggtagttgtaaaatatatgatttttattttgatagtgtttttttaaaaaattaaagttgtattttgtttttttggttagtaagaaatttaaaagggaaatagtaagtgtttggttttttggttatgtttttttgtttttgtttttatttttaaatttatgataagtaggggagattgtttttgttttaggttagtgtttgatttatataatttgttagttttatttgtttagttttggtttttttgtttagggagtttgtggaattggaaaagtttttggtttgtgggtgaaatgttaggtgtgttggttttgttgttttttttttagttttgtttttgttttgtgtggtttttgtgttgtttttttttttttttttgttggtagtggaatggatgttgtaggtggaattaatgttgttgttgtgttttgtaattgtgttttgtgtatgttttttggttttgtgttttgtttttttattttgtgggtttgagttttttgggttgagttttttggtttttttgggttttttttgtgttttagggagtaggtagggggattagtatataattatttggagtttttgtggtttaggtagatttagttgaaattttgtgtgtgttggtgtagaaggtggaggttattttggagttatttggattgtgtttttttttttagaggggtgaggggattttgtgtggttatttatttttaatttggaggtaggtatgggagtaaatgtggggtatatagaggtttagaaaagtattttgggtttattgtttgggttgtgtttgtttttttattttttttttatttttttgtggtttttaggtattttgtatttattttattttttttttttttttaggagtttggttaggtaggttggggttttttgaaaggagtattgatgagtgttgtgttttttaatttggttttgtggggatagagtaggggtttttgtagtttgatttttgttttttagaatttgggtatttttttttttttttagttttgttgattttgtttgtttttagtgagggaagaatagtggtttttagttagggtgtttgttagaattatttggagtaggttagtttttagaggtttgggtagggtatagtttttaatagtttagttttttttggtttaggatgtttttgattgtgttttttgtttttggtatggttttgttttgtttttgtttttagtttttgtttgttattaattttttattttttatttggggttaggtgggattgaaagttagggaggggttggttgaggttagggttggggtggtttttggtagatgtttttgtgtttgttattttaggtattagtgtgggtatttgggtatttagttttgtgttggagttgatggttgaggtagggagggtattggtgttgttagggagtttttggttattttttgagggtgg

SEQ ID NO: 155 - DNA, 2441 bp, Artificial Sequence
  chemically treated genomic DNA (Homo sapiens)
ttatttttagagggtggttaagagttttttggtagtattgatgttttttttgttttagttattagttttagtatggggttggatgtttaaatgtttatgttggtgtttgggatgatgggtatgagggtatttgttaagaattgttttagttttggttttaattagtttttttttggtttttagttttgtttggttttaggtggagagtgaagggttagtgatagataggagttgggagtgggggtagagtaaagttatgttagaggtgagagatatggttaggggtgttttggattagggagagttgagttgttgggagttgtgttttgtttgggtttttgggggttgatttgttttaggtggttttaatgggtattttggttaagagttattgttttttttttattgggagtagatagaattaataaggttgaggaagaaggaaaatgtttaggttttggggaatggaagttagattgtgggggtttttgttttgtttttataaaattaggttgaggggtataatgtttgttagtgttttttttgggagattttggtttgtttgattgagtttttggaaggaaggggaaagtgagatgggtgtgggatgtttggagattatggggaggtgggggagaaatgggggagtgggtatggtttgggtaatgagtttgggatgtttttttggatttttgtgtattttatatttgtttttatatttgtttttaagttaagggtaaataattatatagaatttttttatttttttagaaaggaaaatatggtttgggtggttttggagtggtttttattttttatattaatgtatatagggttttggttgggtttgtttgggttatggaggttttaggtggttgtgtgttggtttttttgtttgttttttggggtataagggaagtttaaggaaattaaaaagtttagtttaaggagtttgaatttgtagggtaaaggagtgggatatggggttaagaagtatgtgtggggtgtgattgtaaaatgtagtagtgatgttagttttgtttgtaatgtttattttattgttagtaagaaaaaaaagggaaatggtatgggggttatgtggggtggaggtaaagttgaggggagggtggtggggttagtgtatttggtgttttgtttatggattgagagtttttttggttttataaattttttgggtagggaggttgggattgggtaagtggagttgatgggttatatgaattagatattagtttggggtggaaatgattttttttatttgttgtgggtttaaaaatgagggtgggggtaaaaaaatgtagttggaggattagatatttattgttttttttttaggttttttgttggttagggaggtggggtgtggttttgattttttaaagggatattgttaagataaaaattatatgttttataattattatttttatgtggttttggagtgggttggataggtttgattggttgtttttttgttatattgtggtgtagaattttataagtttttgggggatgtgaattttgggattgttttaagtgagggttgatttgggtttgggtgggttatgtgtgtgttttggtagtttttgggagttgtgttgttgtagtggggaggttgtggagtttaattttatttttattgtttgtttttttgtagtttgggttatttggggtaatagatttggttaaggtggatgtgagggtagttgaatgttgtttaatgtaggttgggtgtagggtggagattttgaagttatattggttaaagttttttagttagttggtgtttaggtattgttgtttatttattattaattatgaattttttaagagggttggggagaagagttagttttagatttatttattttattattatttttaggtatttgttggagagaatatttatggtggttttttttgttattatgtggaaggggttttaataggaatttggtaggtgaggaggagtgtttgtttttgttttatgtagagaggatggtggttttttggttgggtgttagtttttttggggtatgtggaggttagagttgtttggttatattttggattttggttgtttagtttatttagtataagagggataaatatggagggatttattggatttttagttattagaatataaatagggaggggtaaaaataagggataataaatttagttatgtttgagtattgattattttttaggtgaaatttttttagaggtaaattttttaggggttgtttttttttttattaaaaatttgagtatatgtagtgtttttgaattaaagttaatattaaaagtgttggagagtgtggtgttaggagttttatgatggtaggggtttagagggtttgggttgatagggatttttaagttatgttttttttttagtattaagattatgttag

SEQ ID NO: 156 - DNA, 2818 bp, Artificial Sequence
  chemically treated genomic DNA (Homo sapiens)
gaggtgggggtgttaatgataggtgtttagtaagtgtttttgaggtaattgttgggttgttttggatttggtgaatttttttggggtttagtaaaggtggatgttgattgggttaaggagtgggatttgtagtgttggattatttttttttaagtgtagaagtgttgtgtttgttggtttttaatagggtaagaggttttttttgttgtgtagagtgtagtgtttgtggtggggatagtagaggtgggatgggtgttatggagtttttgggtttttgtgtggttatttatttggttttagttatttgttgaaaaaggggtggatggttttttgggatttgagttgatattgtgtgtggtgttgtggggtaatttgaagttgtgtgtgtgtgtgtgtgtttatgtaggggtttatttagtggttatgggtttttgaagatttgggtgggaagtgtggtttgggaaagtgtaagtgtttttatggtaatgagggtggatggtgttagagtgagttgtttttggaagtgatgtgtggaaggggtgtttgggatgaagttatggttttggaggtggtgggagggttgttggaggaaatgttgttattgtggaaatggtaatgttgttaggtgatgtgtaggaggtgggggttgaggttgggtggttttttgtggattttttgagtttatagtttttaggttgtggaattggagttgttattgtttgagattttaaagtaaagtttagtttttggtgtggaagtggagggattttaggaattgtagtttgtggggtgggtgtggtttttgtttttggttagtttgtttggtttgtgtttgtgtgggtttttgttgtttgggtttttagggattgtggttttggtggtatgttttttgtttttttttgaagtgggagaagatttggtagaggtgttttgtttgttgtagttgtgtgggtggaggaggtagagtttgaggtgtgattttgattaagtttgatgtttttgtttttttagggagtaagtttggttgaaggtttatgttgtagattgggatattgaggtgtggtagtgagattttgtttttttgggtttgtagagggttgggggtgttgatgtgttttttgtgaaaggggatagtgtttgtgtttgtgtttttttggtggtgtttagtttttttgagtttgaggtaatttgggaggatgttgagtttgaggtgggttttttggtgggtttgggtgtgtggtttttgggatagggagtagtgtaagtgtagaatttggttttttgttttgtaggatgttattaatagtttggggagttggttgggtgtggtggtttatgtttgtaattttagtattttgggaggttgaggtgggggaattatttgaggttgggagtttgagattagtttgattaatatggagaaatttggtttttattaaaaatataaaattagatgggtgtggtggtatatatttgtaattttagttatttggaaggttgaggtgggagaattgtttgaatttgggaggtggaggttgtggtgagttaatattatgttattgtattttagttttggtaataagagtgaaattttattttaaaaaaaaaaaaaaaaaaaaaaagtttggggagttttggaagggaaaaaaaggtaaaaattaagggaattttgtgattattaagaattagtttatgagttttatttttaagtttgattgttattttgggttttttattttagtgatttgtttattatgtttttagttgtttaagttggagatttgtatttttttgggtttttttgttttttttgtgtttagttgtatattagtttgtttttattttgttttttaaatgttgttggaatttgtttttttgtttgttttttttttgttttttttttggttgtgttattattatttttgtgggtttttgagtagtatttttatgggtgttttggtttaaatgtttttttttagtggttttttttttatattgttagtagattaatttttttaaaaagtaagtattttttttaaaagtaataagttttttttttttttttttttttttttttttttttttttttttttttttttttttttttttttttgtttttttttttttttttttttttttttttattttgtgtttaggttgaagtgtagtggtataattttggtttattgttaagatttgattttaattttttggatttaagtgatttttttattttagtttgagtagttaggattataggtgtgagttattatatttggtttatttttttattttttgtagagataggattttattatgttgtttagggtggtttttagtttttgggtttaagggatttttttattttggtttttttaagtgttgagattataggtgggaattattatatttagtttataagtttttttagaatattgaagtgttttttttatgattttatggtgaataaagtttattttggttggtatggttttaaggtttgttatgatttgttttttgtgtaatttaatatgatgttggaggtttagtttttattattatttttagttttttttattttttatagtttattgtgagttttttatgtgtttgttatgttgtatttggtggtttgatttttgtagtaatgttttttttggaagggtttttatttggttaattattatttatttttttgggtttagtttagatatgatgttttttattaagtttttttttattttataagatgaggatttgttttttagtattatgttttagtttgtttgggttgttgtaatagaatattttagattgg

SEQ ID NO: 157 - DNA, 2818 bp, Artificial Sequence
  chemically treated genomic DNA (Homo sapiens)
ttagtttaaggtattttattatagtagtttaaatggattaagatatggtgttgagggataagtttttgttttgtgggatgagagggagtttagtggaggatgttatgtttaaattgagtttaaagagatgagtagtagttagttagatggaaatttttttagaagaaatattattgtaaaggttaggttgttaaatatagtgtagtaaatatgtgagggatttatagtgggttgtaggaggtgggaagaattgagaatagtggtgagggttgagtttttagtgttatattaaattatgtaggggataggttatgatgggttttgaagttatgttaattagagtgaattttatttattatgaggttatgagaagggtattttaatgttttaagaggatttgtgggttgggtgtggtggtttttatttgtaattttagtatttggggaggttaaggtaggaggattttttgagtttaggagttggagattattttgggtaatatagtgagattttgtttttataaaaaataaaaaaataagttgggtgtagtggtttatatttgtggttttagttatttaggttaaggtgggaggattatttgagtttaggaggttgagattagattttgatagtgagttaagattatgttattgtattttagtttgggtatagagtgggggaaggggaaaggaaggaaagagagatagagagaggaaggaagggaggaaggaaggaaggaaggaagggagggagggagggagggaggggatttgttgtttttgaggaaaatatttgttttttaggaaaattggtttgttggtagtatggaaaagaaattattgaggaggaatatttgagttagggtatttatgaaaatgttgtttaggaatttataggagtgatggtggtatagttagggaaggagtagaggggaaatagataaggggatagattttagtgatatttaagaggtagaataaaagtgagttagtgtgtaattggatgtgagaggaatggaggggtttaggaggatgtagatttttagtttgggtaattgggagtgtggtggataggttattgagatgaagaatttaagataataattagatttgaagataaagtttatgagttgatttttaatagttatagaatttttttaatttttgttttttttttttttttaagattttttagattttttttttttttttttttttttgagatggagttttgtttttgttgttgaggttggagtgtaatggtgtgatgttggtttattgtaatttttgttttttgggtttaagtgatttttttgttttagttttttgagtagttgggattataggtatatgttattatatttgtttaattttgtatttttagtagagattgggtttttttatgttggttaggttggttttgaatttttgattttaggtgatttttttgttttagttttttaaagtgttgggattgtaggtgtgagttattgtgtttggttaattttttagattattaatgatattttataaaatgagaagttgggttttatgtttgtattgttttttgttttggagattgtatgtttgagtttattgaggggtttgttttgagtttggtgtttttttaggttattttgagtttagggaagttgagtattattagggaagtataagtgtggatattgtttttttttatgaaggatatgttaatgtttttgattttttgtagatttgagaaggtggggttttgttgttatgttttggtgttttggtttatgatgtgggtttttagttgagtttgttttttaggaggatagaagtgttaaatttggttggggttatattttagattttgttttttttatttgtgtggttgtagtggatagagtgtttttgttgggtttttttttgttttaagggaaagtaagggatatattgttgaggttatagtttttaggagtttaggtggtggagatttgtgtaagtgtaggttagataaattggttggaagtgagaattgtgtttattttgtggattataatttttgagatttttttgtttttgtgttggaaattgggttttgttttggagttttgggtggtggtagttttgattttatagtttgaagattatgagtttggagggtttgtgaagggttgtttggttttggtttttgttttttgtgtgttgtttgatagtattattgtttttatagtgatagtgttttttttggtggtttttttgttgtttttagggttatggttttgttttgggtattttttttgtatgttatttttggaagtgatttgttttgatgttgtttgtttttgttgttatggagatgtttgtgtttttttgggttgtattttttatttgggtttttagaagtttgtggttgttgggtgagtttttgtgtgaatgtatatgtatgtatatggttttaggttgttttgtggtgttgtgtgtgatattggtttggattttgggaggttgtttgttttttttttagtggatagttgaggttaggtaagtgattgtgtgaggatttgggaattttgtgatgtttgttttgtttttgttgtttttgttgtaagtgttgtgttttgtatggtgagaggggttttttgttttgttgagagttggtgggtatggtatttttgtgtttggaaaagggtggtttagtattgtaggttttattttttggtttggttagtgtttgtttttgttgaattttgaaaggatttattaggtttaggatagtttggtagttgttttaggagtatttattgagtgtttgttgttgatgtttttatttt

SEQ ID NO: 158 - DNA, 2368 bp, Artificial Sequence
  chemically treated genomic DNA (Homo sapiens)
aatgtgtatattttatttgtattttgatttaaataaattgttaaaaaaaattataatataattgggtatttgaatatagattagatataaaatgatattaaggaattgtgaattattaaatgtgataatagtattgtggttatatgttaaaaagaagaaaatttttattttgtagatatatattttgaaatatttatgtttaaagtgatattatgtttagaatttgttttagaaataattttaaggttgggaagtgggtaagataaagatgaaataagattggttatgagttgttaattgtggaatttgagtgaggattagtatatggggtttgtattatattattttatttttttaaatgtttgaaattttttattaaagttaagataaagttaaattataaagattgttttttaaataaaaaaggggttgggtgtttatgtttgtaattttagtattttgggaggttgaggtgggtggattatgaggttaggaaatttagattattttggttaatatggtgaaattttgtttttattaaaaatataaaaaattagttgggtgtggtggtgggtgtttgtagttttagttatttgggaggttgaggtaggagaatggtgtgagtttgggaggtggagtttgtagtgagttgagattgtgttattgtattttagtttgggtgatagagtgagattttgttttattttttaaaaaaaggaatagaatagaaaggtattaagaagaattagaaaaaaaatttattgtttttgatttattttttgtttttttttaaatgttttggtgtggagaaaaggatgagtattggtaataagtattatagtttgttattggggtgggtgggattgatgttttttttatttaaatttttgatattttgtttattataaatttttttgtaataattgttttttaaaatgttgtattaaaatgttattttttttgattgttgaggaattttgtatttttttaaattttgtgtttgtgttttggttgggagatgtggggaaaattttgggagtttaggatagggagaggtaagtttttatagaagtgggaatggttaatagttttttgagaagatagttttttttttggggaggtagaggaagttttaagaatatataaagataggagagtggaagggttggttagtttggagatattaaaagagattttggatgaggataggggttgatttgaaagttttgtttgattttgggttgtaggagggggtgtgggatgggggtggagttgttggtgatgataatagttttatgtgattggttaatattgagtgttgttttgttttggtgttagagttgttgtggtttgttttatttttggtggtggtatttgtttttggtggttttgaggatgtgtgggttaggggtggttttgaaattaggaagtggagggggagtaggtaaggaatttggtggggggtttttggggttggtgtgagggagtggttttggtttgtggatgtttattttgggggagttgtgtggagaagtaattggtttgtgatgtagtttttgggttttgtggtgggtttgtgagttttttttgagtggagaggtgtttggtttggagggagttggtggttttggggttatgattttttggaaatatttgtttatgttattagtgtaagtttttttgatatttttgttttgtattttttggtgtagaaaatggtggttagtttgtggggtggggtggttgaggtggggggtgagggtggtgaggagggttagggttagggttagggttagggttttggggtggggtgggggaggggttggatggtggtagtttttagttagtgttttgttgtagtagtttttattttttttattttggtagtttgtaggtttgtggggttaagtgttgtggtggtgtattttgtgttaagaatttggaggaggagattgtaaggataggtttaggttggtgtgagggttggtggtgaggtgggggttggaatgtgaggaaagtttagtttgagattttaatttatgtttttatttttgtttttttttattttatgtaatttttttttttttatatgttatttttgttttttattttgttgtttgtggaagtttggagatggatttatagggaaaatggtgggttttgtggaagggaggggtttggattgagggtattttatagggtatattggttttttaggtggaaaaaaatgaaatgttagagtataaagttaagtttagggttttgaattttaaaaggtgtttagtagggtttttgtttttagtgtttattagtttattaagaatttagtttatttttttttttttgttttttaggagtaatggagttt

SEQ ID NO: 159 - DNA, 2368 bp, Artificial Sequence
  chemically treated genomic DNA (Homo sapiens)
ggattttattatttttaggagataagagagagaaaatgggttgaatttttggtggattgataagtattgaggatagaggttttattaggtattttttaaaatttagagttttggatttgattttatattttaatattttatttttttttatttgagaagttagtatgttttgtggggtgtttttaatttgagttttttttttttgtaaagtttattattttttttgtagatttatttttaggtttttgtaggtagtaaaatggaggatgaggatggtgtgtgggaaggggagggttgtatggggtagaggggggtgagggtgaaggtatggattagggttttagattgggttttttttatgttttggtttttgttttattattgatttttgtattgatttgggtttatttttgtagtttttttttttggatttttgatgtgaggtgtgttgttgtgatatttagttttgtagatttgtagattgttggggtgggggaagtgggggttgttgtagtagaatgttagttaggaattattgttatttggttttttttttgttttgttttgaggttttggttttggttttggttttggttttttttgttatttttgttttttgttttagttgttttgttttgtaagttgattattattttttgtattaagaagtgtggggtaggggtgttggaaaagtttgtgttgatggtgtaggtaggtgtttttgaagggttgtagttttaggattgttggttttttttgggttgggtatttttttgtttaaggaaggtttgtgggtttgttgtggggtttgggggttgtattgtggattgattgtttttttgtatggtttttttggggtgggtatttgtaggttggagttatttttttatattaattttagggattttttgttgggttttttatttgttttttttttgttttttaattttggggttgtttttggtttatatgtttttagggttattgggagtaggtattattgttgagaatggaatgagttatgatggttttgatgttagagtgagataatatttagtgttggttggttatgtggggttgttgttattgttaatggttttgtttttgttttatgtttttttttgtagtttggagttaggtggggtttttgggttagtttttatttttatttggagttttttttagtatttttagattggttggtttttttatttttttgtttttgtgtatttttgggattttttttgtttttttaagagggaagttgtttttttagggagttgttggttatttttatttttgtggggatttgtttttttttgttttgggtttttaggattttttttatattttttaattaggatgtgggtgtagaatttaaaggggtgtaaaattttttagtagttaagaaaaataatattttaatgtaatattttaaaaaataattattgtaagaaaatttatgatgagtaagatgttaaaaatttaaataaagagagtattagttttgtttattttaatggtaaattgtggtatttgttattaatgtttatttttttttttatattagaatgtttggggggggataggaaatgagttaaggatagtggattttttttttaattttttttaatatttttttgttttgtttttttttttggggggtggggtagagttttgttttgttgtttaggttggagtgtagtggtgtgattttggtttattgtaagttttgttttttgggtttatgttatttttttgttttagttttttgagtagttgggattataggtgtttgttattatgtttggttaattttttgtatttttagtagagatggggttttattgtgttagttaggatggtttggattttttgattttgtgatttgtttgttttggttttttaaagtgttgggattataggtgtgagtgtttggttttttttttgtttaagaaatagtttttatagtttaattttattttaattttaatggaaaattttgaatatttggaaaaatggaatagtataatgtaaattttatgtattagtttttatttagattttatagttaataatttatggttaattttattttgtttttattttatttgttttttaattttaaaattatttttgaagtaaattttagatataatattattttaggtataaatattttaaagtatgtatttataagataagggtttttttttttttagtatataattataatattgttgttatatttaataatttataattttttaatattattttatgtttaatttgtgtttaaatatttaattgtattatagttttttttaatagtttgtttgaattaagatataaataagatatgtgtatt

SEQ ID NO: 160 - DNA, 2429 bp, Artificial Sequence
  chemically treated genomic DNA (Homo sapiens)
gttgttaaggttgtggtgttatgtttttaagtggatatggtagaagttttggggttagatataagatttttaagtttgaatgggtagtgtaaaatttagataagttttttggtagtgttgttaatttttgttaggtatagaagatatagtgagaattgtgagttgttatgaaagtttaaaatattgagtttgtgttttgttaagtagtaggtgtataaatttatatttttgagtgttttttggaggttttgtttattttttttttttgagttggttagagatttggaagagggtgggttaagggtgaggagggtagtatgtgtatgtgtgtttaggatttagttagtgagttaataaggaattttgtgagtgttgaaagttggtggtgtaggttgttgttttggatgttggtgagatagatgttattttttagaggaagaggaggaggtggtgaagtgtttttttagttttagttttttttttgttttttttttttttttttttaattttttgtttttttttaaattagttggttttttttgattttagtgatttgtttggttttgtttatttttgttgatgtgatttttgttgtgaggtaagtgttggtggaatttagagttttgtggaagagtagaatgtttgggagtgtgtagtttttgggtttggtttaggtttgttgtggaggtgtggtgtaggggagtgtttgggtgggagttttgtttttttattagtttattgtgatgtagtatttaggtttaggtttttttgtttatttttgttggatttgggtttttggtagtagtgggtgatgtagatggaatattatgttgtttgtggttgagtttttgttatttttgttttttgagagtgtgttttttaagtttgtagttttgattgttagtggtgggagtaatagtagtaataaaggtggttttgaaggtgttgtggtgtaggtggttgtgtttgtggttagtgttggttttgtagatgttgagatggaggtgagggtgatttgtggtatggggagtgggtgtagtggggaggaggagttggtttttttgttggattgtggtgattggatgtagagttgggtttttttttttgtattagatttagttttatattttgtggatatgaaatgatgtttttatttttgtttttttgtttttattttatttgagttaagtaaaatggatttttggttttttatatttaaattatttgttttttttgtgaattttgataaatatttgaatgtttttagtgaatagatgtttttggttattgtggtttgggggatttattgttttttttttattagatttttataatttttttttttatttttgaatgtggtttttagtttttattaaattttggggaagggtgaggagatgattttttaggagtgggatgtatgggtggggtgaaggaggtatttaaaagtagtgtgtttgaggatttgggttttttttttttttttttggtttttgtaggggtggtatttgttgtgggtagaaataatggtgagagttggatggttgagtgtgtagtggggataagtggggtgtagttgtttttgtgaagggagagaaggttttttttaggtattattttattggaagggaagtaattaaggtagtagtagttgttttggattttttgtttaatttaggggggatgaataagtgtaggaatgaattagagaattaggtgtagttggttggtttttagtttggtatttttttttttttggtttttggttttaagaaaaaaaaaaattagtattatttgttgttgagatttatgggtttgggttgggtaggggatgttgatagtattgagggggttggaaagatgggggaagttgttaggtgggtaaattggatatgtttttaggttttgtatttgggaataaagtaattgttttttttaatttttatttttttggtttttgatttgttttgagatattttgtgagttggagtttaaagatttttgggatttttttatttttagatagaatgaaagtaatattgttttgaagatgagttttgatgtagaattattatatagtaagaaaatggtagtgtaatttattattgaggtttttggtatagtagttatatttgggtagttggggttaagtaatattaatgttagtaattatttaaagaatttttagtggtgagggtaggtttagtgatataggaatttttgatagtttttgtagttttgagtgattaagataagattatttttaaattaaaatatatttagtgttgtttttttttttttaaggaaatggtttttttgggttattagggttttttaatttggatttttgttttaaggtttaaggggtttgatataaagtaattatgtgtaaatgtgtagttttttataaaaattgtttatagtttttt

SEQ ID NO: 161 - DNA, 2429 bp, Artificial Sequence
  chemically treated genomic DNA (Homo sapiens)
gaaaaattataaataatttttgtagagaattgtatatttatatataattgttttgtgttaaattttttaagttttggaatagaaatttaagttaaagagttttagtaatttaaaagaattatttttttaaggaaaaaaaagtaatattgaatatattttaatttggaagtaattttattttaattatttaaaattataggaattattaggagtttttatgttattaaatttatttttattattaaaagttttttaaatgattattaatattaatgttatttaattttagttatttaaatataattattgtgttaaaagttttaatggtaaattatgttattatttttttattgtataatgattttgtattaagatttatttttggagtagtattatttttattttgtttaaggataggaaaattttagaaatttttgggttttgatttataaaatattttaaaataggttgaaggttaagaaaataaaaattggaaggagtaattattttgtttttagatgtaaagtttggaagtatatttaatttatttgtttggtagttttttttatttttttagtttttttagtattgttagtattttttgtttaatttaaatttataagttttggtagtgagtggtattaattttttttttttttaaggttagaggttaaaaagagaaaagtgttggattgagagttaattaattgtgtttggttttttaatttatttttatatttatttattttttttaaattagatgggggatttgagatagttgttgttgttttggttgttttttttttagtggaatagtgtttgggaggggttttttttttttttatagaagtagttgtgttttgtttatttttattgtgtatttggttatttagtttttgttattgtttttgtttataatagatattgtttttgtaaggattgggaagaagaaaaggaggtttaagtttttggatgtgttgtttttaaatgttttttttattttgtttgtgtattttgtttttaaggggttatttttttgtttttttttgaagtttggtggaaattaaaaattatatttagaggtaggagagggaattatgggagtttagtgggaaaaaaatgatgggttttttgggttatggtaattaagaatatttgtttattgagagtgtttaaatatttgttaggatttatgaaagagataaataatttaaatgtgaggagttagaaatttattttgtttagtttgaatagggtaagaataagggagtaagagtgagagtattattttgtatttatagggtgtgaagttgagtttggtgtagagagagaaatttggttttgtgtttgattgttatgatttggtgagggagttagttttttttttttgttgtatttgttttttatgttgtaagttgtttttatttttattttggtgtttgtgggattagtgttggttgtagatgtaattgtttgtgttgtgatgtttttggggttgtttttgttgttgttgttgtttttgttgttggtgattgaggttgtgggtttggaaggtgtgtttttgggaggtgggggtggtggaggtttggttgtggatgatatgatgttttgtttgtgttatttgttgttgttagaggtttgagtttggtggggatggatggggaggtttaggtttggatgttatgttgtaataaattggtggaggagtgagatttttatttgagtgtttttttgtgttgtgtttttgtgatgggtttgagttgggtttaggagttgtatatttttaaatgttttgtttttttgtggggttttaggttttattggtgtttattttatggtgggaattatgttgatgagggtgggtggggttagatgggttattgaggttaaggaaggttggttgatttagagaagggtggagggttgggggaagggaaaaggaaaatgaaagagagattgaggttgggaaaatgttttgttgtttttttttttttttttggaagataatatttattttgttagtatttaggatgatgatttatgttattgatttttaatatttgtgagattttttattggtttattgattgggttttgagtgtgtatgtgtatattgttttttttatttttggtttgtttttttttagatttttagttggtttgggagagaagagtgggtgggatttttagggagtgtttggaggtgtaggtttgtgtgtttgttgtttggtaggatgtgagtttagtgttttaggtttttgtaatggtttatggtttttgttgtgttttttgtgtttgataggggttggtggtattattggaaaatttgtttgggttttgtgttgtttatttaaatttggaagttttgtgtttggttttaaaatttttgttgtatttgtttagaggtgtgatgttatagttttgatgat

SEQ ID NO: 162 - DNA, 2284 bp, Artificial Sequence
  chemically treated genomic DNA (Homo sapiens)
tgtggtattgttttttgtattgtagggttttttgggattgatagattttggataatagtagttgggaaatattttaaatatataatatatttttaatttttaaatattggagttgtggggtttttttttttttttttttttttttttgggggttggaggtggaattttttggaaaattttggtattttgtttttttattaattttattttttgtggttgtttttattaagatatattttttttttgataatttttttatattgtatttagtataatagatgtatttgtggatttattgggtttttattgggttttgggaatattgatgttattttatttaaaaattaatttaagtttaatgttttgatgaaaatgaaaatatatttatagggaagtaaatatttatagttatttagttttttaaatgttatatatattttattttatttaaagtgttttttttttttttttaattataaaataatttagtttatttttaggaagatttttttatttattgtttttagttatgttagtatatttttggttttaaggatagagaatagttaggagttatagtattttgttttttattttttgtatgtttttttttaatttttatttttttttttttttgtgttgtttttttttttttttatgtaaagtagaataagaagattgttttttataaagataataggttttttttaattgtaaatgattatattataagttgtatttgttagttaattagtgtatttaagtttttgttagtggatgttgaaatgatgtttgtaataattgattgggtttttgtgagtttagggatgtagattttttttttttttgttttttgtgtgagttttagttgttaatgaaaattgtatgaaatagattttttttttgttatgtaattggttttttttttgttttttggttgatttgggtataatgttttttatgagagtggagatgtttgtggtgatggtggagttggggaaggggatgtggggatttgagagtatggaatgttttgtttaggtggatgttagttttttgtttgtgagtagtttagtgtattgtttatttggttgtggatggggtggttttatttaattatgatttttttttttgaaatggagtaagattgaataatttattatatgatggatggtgagggaaggaaatgtaaaaaagaaaaggaaaagaaaaaaattggaattagatggttaaattttatattagtattgagaggttgttaggagattttattttgtttgtggttgttttggttttaggtttggttttttggtgtttgtgggtttttatttttttgtttgtttagtttttttagttaggtgtggttgtttttggattggttttttttggttgagtgtggagagtagggttgggtgttggggttaagggaggggtggaggggtgtgtgtttgggtagggatgggggagggagattgggtggaatgaagtggggaaagataagagtggtagaagaaaaaaaaaatttttggttaggagaaaagtggtggattatgtagagagatgttatgaaatttgtagatttaatgaatgttatttaattttagttgattggttgagttttgttggtagtgtatgaagtgatgtggttttgagataaaagtgagtgtagtgttgtgtgttggggaaaaagttgtatagtgttggtgtggtttgggaggaaggggtgggggtgagtaggatagagttatagatttagagatgtttattttgttgtttatgttagttagtgtgttagtgtgttgaggattgggtttggtgggggtgggttgggtataaattaatgtgtattttttgttattggaaatgtgggtgttttatgttgggggaattttttgggttttggtttttgattttttagttttaattttttttttagtgttattaagtaagttatttttggagaaatgtttggaaagtaggaaagagttgaagtttggggagtagttttgtttgttggttgtaggggtttggtttttagggttttgtgagataaggaaaaagaggttttgggtattgttttttattgggttgaaatttgtgagaggtagttttggtgtgggagttggagtttgtattgtttagagggggtgtagtgagtggttgggatggaggggaggggttttatttttgagttttgtttgtatttggtggtgttttagtttgttgttttatttagttttttttgttttgtttattgtaattgggatttggttttggttgttgt

SEQ ID NO: 163 - DNA, 2284 bp, Artificial Sequence
  chemically treated genomic DNA (Homo sapiens)
gtagtagttgggattaggttttagttgtagtggataggatagaagggattgaatggggtagtaggttggggtgttattaggtgtaagtaaagtttagggatagggttttttttttttgttttggttgtttgttgtgttttttttgggtggtgtaggttttggtttttgtgttggggttgttttttatggattttagtttggtgggaggtagtgtttagagtttttttttttttattttataaaattttaaaagttgaatttttataattagtagataaaattgttttttgagttttggtttttttttgttttttaggtgtttttttgggaataatttatttagtggtattgggagaaaggttgggattggggggttggggattgaaatttaaaagatttttttagtatggagtatttatgtttttagtggtgggggatgtatgttggtttgtgtttagtttgtttttattaagtttggtttttgatgtgttgatatgttagttggtatgggtggtggggtgggtgtttttgggtttgtggttttgttttgtttgtttttgttttttttttttggattgtgttggtgttgtgtggttttttttttagtatgtggtgttgtatttgtttttattttggagttgtgttgttttgtgtgttgttagtggggtttagttagttggttggaattgagtagtatttattgaatttgtggattttatgatgtttttttgtgtggtttattattttttttttaattggggatttttttttttttttgttatttttatttttttttattttattttatttagttttttttttttgtttttgtttaaatgtgtgtttttttgttttttttttggttttagtgtttagttttgttttttgtgtttggttagagggagttagtttggagatggttgtatttggttggagaggttgggtgggtggaggggtggagatttgtggatgttgggaagttggatttggagttggagtagttgtgagtagaatggagttttttaatagttttttggtgttgatgtgaaatttgattatttgattttagtttttttttttttttttttttttttgtattttttttttttgttatttgttgtgtagtgaattgtttagttttgttttgttttaagagaggagattatgattgagtgaagttattttgtttgtagttaggtaagtggtgtgttgagttgtttgtaggtgaggagttggtgtttatttgggtgaggtgttttgtgtttttgggtttttgtgtttttttttttagttttgttgttgttgtaggtatttttatttttatgagaaatattgtgtttaagttagttgaaaggtgagggagaagttggttatataatagaaggggaatttgttttatatggtttttattagtgattgaaatttgtatggggggtgggggaaggaggggtttgtatttttgggtttgtagaaatttagttagttattgtagatattattttaatatttgttggtaaagatttaaatgtattgattaattgataggtgtggtttgtgatgtagttatttatagttgggaaaagtttattgtttttgtggaaggtagtttttttgttttgttttgtatggagaggagaggagataatatgaaagggaggaaaagtgagggttggggagaaatatgtggagaatgggaaatagaatattgtaatttttaattgttttttatttttaaaattgaagatgtgttagtatgattaaaaatagtgaataggaagatttttttaggagtaaattgaattattttgtaattggaagggaagaaaaaatattttagataaaatgagatgtgtgtggtatttagaggattgggtggttgtggatatttgtttttttgtggatatatttttatttttattaaaatattaagtttggattagtttttaagtgaaataatattagtatttttaaaatttaataaaagtttagtggatttataggtatatttgttgtattaggtgtaatatggagagattgttagggggaaaatatattttaatagaaatagttatagagggtgaggttagtggagaaataaaatattagaattttttaaagaattttgtttttaatttttaaaaaaaggaagagaaaaaaaaaaaaattttataattttagtgtttgggagttggagatgtattatatgtttagagtgttttttaattgttgttatttaaagtttgttggttttggggagttttatggtatagggagtaatgttata

SEQ ID NO: 164 - DNA, 2290 bp, Artificial Sequence
  chemically treated genomic DNA (Homo sapiens)
aatgtagtaatatttgggtttatttagtaatatagttattatttatatatatttaaaggttattaagataaggtagatgtaggatagtttttttatttgtttattaaaatggaaattttaggttagtttttataagaaatgggaaatttaagtgattttggtgaaatgatttttgagaaaattttttaagggtaataaaataatattttaaataaatagattttatttgagggaatggggatattatatagtaattgatatttgaatggttttaaatggattgatttgttgtaagttttgaggttgagttaaatttttatgaagaattattaggaatagggttattagaaaattaagttttaaaagtgtttttgtttttgttgaaggtattatattttggtatttttaagaattgttttttgagggagggaataaaggagagtggataatttgtagtaaattttttttttatgtttttagaaaatgtagagatgataggatttgaaaatttttgttataaagatggtttttaaaaatgtatataattttaaatgattatttgggtagttataattgtatgtttatagtttgtatttagaggtatggttttatgttttggttttgaaggataataaggaggtttttaaggaaatgttgtgagaaagattgttggttaagtattgttatggttattggaggagtatttgttagtgaattgatgttggtttttttagttttattagtgtatgtatattagtttgtgtattttggttgttgttggtaggttttattagttaagttggaggagtagttgttgtaattatggtaagtgaattgaaattttagagttggttttgtttggtagagtgtttgtgttttttgtgtagtgtatgttttgtgtgtaaatttgagatgtgattgtgagttgtgattttgtgtggttgtgatgggttttatttaatgtgtatgaggggattattattgtttttgttttgggtgtttgtggttttatattatttttgtatataatgtggttggtgttaagtttttaaatgttttgagagttttaaggattgtgtgtgtgaaggtgttgtagtaagtgggtatatattagatattattttggtgtgttttgtgggagaagttagtgtatatatttttttgtaaggtggggttgttagtgtaatataggaattttgttttttttttagaaaagtttttttttttattttttttttaatatatttatttgtgttttaatagttttttttttgtgttatatgtggttgtatttgggtatgtttatgtttgtgtatgttgttaggtgtgattgtttttgtttggtttttgttgtttttaatttgtttgtgtttatgggaggggtggtgttattttttgaggtgtttaattttttttatttttgttgtaatgggttgagttttaggaattttgtgggtataatttttgttgtttttattagtgtttttgtttagagtttggattagggtgtattatttttattttgttagatgtagtgggggtgtgtatagattttagttttggtgtttaaaatggattaggggtaaggtgtggatgttgtttttgtttttatgtttttagtatttgtttgttgtgatttgaagttgtagttattatggtttgtgttgttggttgttagtattgttgtggaggagttgtttggggtgagttttgtggagaggtggtggtggtggtggtggtgggaaaggggattggaagttggtggaatttttgttttatttgtgttgtgttgtgttgtgttggtaattgttttttttatttggttggttattgttttagtgatgtttaggtgttgtggttttgttgtttgtagtggggtgggaaggaggggtttgtttggaagagtgttaggaggtggggttggtggtgagtttgtggtgttgtggttgttgttggtgtgtgttttgtttgattgttttttgggtttgtgttggtagggagatgttgggttttagtagtttagttttgtttttttggatttttgagttttattaggtttttttgataaggtttttttggatttggtggagagtgttgagtgtttagaggaggttgattttaggtgtaagtttgtaaattttgaggtttggggtgttaatggggagttagagtagttaatgtgggggttattttatgtgtttataaatgtatttataaatatatataagtatatatatatatgtgtgttttttttaaaaattttttttttttttttattttgtagttaagg

SEQ ID NO: 165 - DNA, 2290 bp, Artificial Sequence
  chemically treated genomic DNA (Homo sapiens)
ttttggttgtgaagtagggggaaaaagagaatttttaaaagagatatatatatgtgtgtatatttatatatatttataaatatatttatgaatatataaagtaatttttatgttagttgttttgattttttgttagtgttttgggttttgggatttgtaaatttgtatttggaattagttttttttgggtgtttaatgttttttattgagtttagagaaattttgttggggaagtttggtgagatttggaagtttggagggatggagttgagttgttgaagtttggtatttttttgttggtatggatttgaagggtggttgggtagggtatgtgttggtggtggttgtggtgttgtgaatttgttgttggttttgttttttggtgtttttttaagtaagttttttttttttgttttgttataaatggtgggattgtggtgtttgggtgttattgaggtagtagttggttgggtgaggagggtggttgttggtgtggtgtggtgtggtgtgggtggggtgggggttttgttggtttttagtttttttttttgttgttgttgttgttattgtttttttgtggagtttgttttgagtgatttttttgtggtagtgttgatggttagtggtatgagttgtagtagttgtagttttgagttatagtaggtaagtgttgggggtgtgggggtggggatggtgtttgtgttttgtttttggtttattttggatgttgaggttaaggtttgtgtgtgtttttgttgtgtttagtagggtaggggtggtgtgttttagtttgaattttgggtgggaatattggtgggggtggtggaggttgtgtttgtgaagtttttagagtttagtttgttgtggtgggagtagagagaattgggtgttttgggaggtggtattgttttttttgtgggtataagtaggttgggggtggtgggagttgagtggggatagttgtgtttggtagtgtgtatgggtgtggatgtgtttgggtgtggttgtgtgtagtgtaagaaggaaattgttgagatgtaggtgagtgtattggagggaaagtgggggagggggtttttttagaaaaagggtaggatttttgtgttgtattggtaattttgttttgtgggaggatgtgtgtattggttttttttgtggaatatgttggggtggtgtttggtgtgtgtttatttgttatggtgtttttgtgtgtgtggtttttggagtttttggggtgtttggagatttaatattggttgtgttgtgtgtggaggtggtgtagggttgtgggtgtttagggtaggagtaatgatgatttttttgtgtgtgttaggtgaggtttgttgtagttgtgtgaggttgtagtttgtggttatattttgggtttgtgtgtgaggtgtgtgttgtgtgggaagtgtgggtgttttgttgggtgaggttggttttgggattttagtttgtttgttgtggttgtggtagttgtttttttagtttggttggtagggtttgttagtggtggttggggtgtatggattagtgtgtgtgtattggtgagattgggggagttagtgttggtttattggtaggtgtttttttagtggttgtgataatgtttagttagtagttttttttatggtatttttttaaaagtttttttgttattttttagggttagagtgtaaaattatgtttttagatgtgagttatgagtatgtagttgtagttgtttagatggttatttagaattgtgtgtatttttaaagattatttttatgataaagatttttaagttttattgtttttatattttttgaaaatatgggaaaaggatttgttatgagttgtttatttttttttatttttttttttaaagaatggtttttagaagtgttaaaatgtaatatttttggtaaggataaaagtgtttttaaaatttaattttttagtggttttatttttaataattttttataaaaatttagtttagttttaaaatttatggtgaattagtttatttaaaattatttgaatattaattgttgtgtaatgtttttatttttttaagtaaaatttgtttgtttgaaatattgttttgttgtttttgaagagtttttttaagaattgttttgttagagttgtttgaattttttattttttgtggaagttgatttggagtttttattttggtgagtgggtggaaaagttgttttgtatttattttgttttagtaatttttgggtatatataaatggtgattgtattgttgagtggatttgaatgttattgtatt

SEQ ID NO: 166 - DNA, 17968 bp, Artificial Sequence
  chemically treated genomic DNA (Homo sapiens)
ggtttttggaggttgggatttgtggagggtttagtagtaggaagaaattttaggaggaagaaattttagatagattgttggtgaggtagtgtgggatttagttttaggtgtgtgtggatggtgtgtggagtgagtttttttaaaagtggagtttttgtgatgatgagtataggtttgtttgtgtgtttgtgggttgtttttttattggtggtttttagttgtggagagtagaatttggtagttttaggggttgtttgtgggagggtgttttttgttgtatgtgtgtgtttgttatgggtgtgtgtgtgtgtgtgttgggggggtgtgtttgtgtgtgtgtttgtgtgtgtgtatgtgtagtgtttgtttgtgtgttgatttttgttttttttttatgtttttttttttttttttttttttttttttttgtttttttttttgttttttttgtggttttttttttttgtttttgtttgtttgtgtgtgtgtgtgttttgggatatatgtgttttgtgtgttggagggtgggttttttgtatgttggttttttttttggttagtttttttttgtgtttttgtttgggttgtgtggttggttggtagttgttgttttggtggttttagtttgggggtttgtgaaggtttgggtaatgtgggtattggtgttggatttgtaggggtttttattttttttttatttggagtagtttttttgttaggttggatttagatgagtgttttttaattaaggataatggttttttaggtgtttattgtttatttgtaggagggtgtttgtagagttttaagaaggtggttgttatgtttgttgttttttgtttttattgagaaatgtagttatagtttgatgtagggatggagaaggaagttggtaaggggatggggtaagtatgtttgttttttaaaggttggtttttttggttgagttatttgtttgatatttttttttggatgttggtggtggtggtatggtttttttgtattttgtttgggttttggtttttgttttgattttttttttgttgtgtttgttttgtttttgagaagtttggtggttttttagtgtggtttagtgttttttataaagaagatttttttgtttattagggagaaattttgtggtggtttgtgttatgattgtttttttttttatatttttttttggatgattgggtagttgtggtgattttggagttttgggtttttatatttgtgtgggatagggaagtttttttggtttttatggtttaagtgatggttgtatgtttggtttaggaagaggtggaggtaagtttattgtttttgatattggttttttaggaaaggtggtgttgtattttatttgtattttttttttgatttttgagggttaattgttttttttgtttttggggaaagtgttttttagtattgaattttttggttgttatggatgttagggagttaatgggattgggttttggttgggtgtaggggaggttgtgttaggggtatttagttggtggtgggttgggggtggggtgtattttgtttaaattttttggtttttttggtgggtttttttgaatgtggtgtggatttgtgtataggttttgttttgtaggtttttaggtgtgtttggttttttttttgttttgtggggtaggtttttagtggttttttgggtgtatgtttggatattattgtttgttttgttgttgttttttatggttttaaagatatatgttgtttgtatgtgtttttgggggatgatagtgttatatgtggatatattggttttagtttggatttgtttttgtttttttttgtttgtgttgttggaagttgttttgggttgttggagtttttgggttttggagatgaaggtaggtttttgtttttgttaggaaggagggaggtagtgggtttatgggttggtgtttttgtagttgatagtatgttttgtggttttggggatttttttgtgttttggtgagattttttttgttttattgtattggaattttatttttgattatttgttgggatttattattggattttaagaggagtttgtgtagtttagttggtattttgaagttttttttttagtgggaattgaagtagaagagtgattaaggaggtttttattataggatttttatgggtttgattatgggttttttgtaggtttttttggtagttttttttttatttgttgttttgggttgtgtttttgttgttgttgttgtaatttttagtattgttgttttaggttttgtagttgttgtgttgttgttattttttaaagggtttgtagtttgattttgtggagtaagggggggtggagtgggggagttggttttgttagtgtgtatgtgtgaggtttgagttgttgtttgggttatagtgaaagttattgttgtttggggatgggtttttgatatttggggaagtaggagttttgtgtgattgtgtgtttgagtttgggttgagattagttttggttagggtagttattaggatggtttttggaggttgggatttgtggagggtttagtagtaggaagaaattttaggaggaagaaattttagatagattgttggtgaggtagtgtgggattttagttttaggtgtgtgtggatggtgtgtgggtgagtttttttaaaagtggagtttttgtgatgatgagtataggtttgtttgtgtgtttgtgggttgtttttttattggtggtttttagttgtggagagtagaatttggtagttttaggggttgtttgtgggagggtgttttttgttgtatgtgtgtgtttgttatgggtgtgtgtgtgtgtgtgttggggggggtgtgtttgtgtgtgtgtttgtgtgtgtgtgtgtgtagtgtttgtttgtgtgttgatttttgttttttttttatgtttttttttttttttttttttttttttttttttttttgtttttttttttgttttttttgtggttttttttttttgtttttgtttgtttgtgtgtgtgtgtgttttgggatatatgtgttttgtgtgttggagggtgggttttttgtatgttggttttttttttggttagtttttttttgtgtttttgtttgggttgtgtggttggttggtagttgttgttttggtggttttagtttgggggtttgtgaaggtttgggtaatgtgggtattggtgttggatttgtaggggtttttattttttttttatttggagtagtttttttgttaggttggatttagatgagtgttttttaattaaggataatggttttttaggtgtttattgtttatttgtaggagggtgtttgtagagttttaagaaggtggttgttatgtttgttgttttttgtttttattgagaaatgtagttatagtttgatgtagggatggagaaggaagttggtaaggggatggggtaagtatgtttgttttttaaaggttggtttttttggttgagttatttgtttgatatttttttttggatgttggtggtggtggtatggtttttttgtattttgtttgggttttggtttttgttttgattttttttttgttgtgtttgttttgtttttgagaagtttggtggttttttagtgtggtttagtgttttttataaagaagatttttttgtttattagggagaaattttgtggtggtttgtgttatgattgtttttttttttatatttttttttggatgattgggtagttgtggtgattttggagttttgggtttttatatttgtgtgggatagggaagtttttttggtttttatggtttaagtgatggttgtatgtttggtttaggaagaggtggaggtaagtttattgtttttgatattggttttttaggaaaggtggtgttgtattttatttgtattttttttttgatttttgagggttaattgttttttttgtttttggggaaagtgttttttagtattgaattttttggttgttatggatgttaggagttaatgggattgggttttggttgggtgtaggggaggttgtgttaggggtatttagttggtggtgggttgggggtggggtgtattttgtttaaattttttggtttttttggtgggtttttttgaatgtggtgtggatttgtgtataggttttgttttgtaggtttttaggtgtgtttggttttttttttgttttgtggggtaggtttttagtggttttttgggtgtatgtttggatattattgtttgttttgttgttgttttttatggttttaaagatatatgttgtttgtatgtgtttttgggggatgatagtgttatatgtggatatattggttttagtttggatttgtttttgtttttttttgtttgtgttgttggaagttgttttgggttgttggagtttttgggttttggagatgaaggtaggtttttgtttttgttaggaaggagggaggtagtgggtttatgggttggtgtttttgtagttgatagtatgttttgtggttttggggatttttttgtgttttggtgagattttttttgttttattgtattggaattttatttttgattatttgttgggatttattattggattttaagaggagtttgtgtagtttagttggtattttgaagttttttttttagtgggaattgaagtagaagagtgattaaggaggtttttattataggatttttatgggtttgattatgggttttttgtaggtttttttggtagttttttttttatttgttgttttgggttgtgtttttgttgttgttgttgtaatttttagtattgttgttttaggttttgtagttgttgtgttgttgttattttttaaagggtttgtagtttgattttgtggagtaagggggggtggagtgggggagttggttttgttagtgtgtatgtgtgaggtttgagttgttgtttgggttatagtgaaagttattgttgtttggggatgggtttttgatatttggggaagtaggagttttgtgtgattgtgtgtttgagtttgggttgagattagttttggttagggtagttattaggatggtttttggaggttgggatttgtggagggtttagtagtaggaagaaattttaggaggaagaaattttagatagattgttggtgaggtagtgtgggattttagttttaggtgtgtgtggatggtgtgtgggtgagtttttttaaaagtggagtttttgtgatgatgagtataggtttgtttgtgtgtttgtgggttgtttttttattggtggtttttagttgtggagagtagaatttggtagttttaggggttgtttgtgggagggtgttttttgttgtatgtgtgtgtttgttatgggtgtgtgtgtgtgtgtgttggggggggtgtgtttgtgtgtgtgtttgtgtgtgtgtgtgtgtagtgtttgtttgtgtgttgatttttgttttttttttatgttttttttttttttttttttttttttttttttttttttttttttgttttttttttttttgtttttttttttgttttttttgtggttttttttttttgtttttgtttgtttgtgtgtgtgtgtgttttgggatatatgtgttttgtgtgttggagggtgggttttttgtatgttggttttttttttggttagtttttttttgtgtttttgtttgggttgtgtggttggttggtagttgttgttttggtggttttagtttgggggtttgtgaaggtttgggtaatgtgggtattggtgttggatttgtaggggtttttattttttttttatttggagtagtttttttgttaggttggatttagatgagtgttttttaattaaggataatggttttttaggtgtttattgtttatttgtaggagggtgtttgtagagttttaagaaggtggttgttatgtttgttgttttttgtttttattgagaaatgtagttatagtttgatgtagggatggagaaggaagttggtaaggggatggggtaagtatgtttgttttttaaaggttggtttttttggttgagttatttgtttgatatttttttttggatgttggtggtggtggtatggtttttttgtattttgtttgggttttggtttttgttttgattttttttttgttgtgtttgttttgtttttgagaagtttggtggttttttagtgtggtttagtgttttttataaagaagatttttttgtttattagggagaaattttgtggtggtttgtgttatgattgtttttttttttatatttttttttggatgattgggtagttgtggtgattttggagttttgggtttttatatttgtgtgggatagggaagtttttttggtttttatggtttaagtgatggttgtatgtttggtttaggaagaggtggaggtaagtttattgtttttgatattggttttttaggaaaggtggtgttgtattttatttgtattttttttttgatttttgagggttaattgttttttttgtttttggggaaagtgttttttagtattgaatgttttggttgttatggatgttagggagttaatgggattgggttttggttgggtgtaggggaggttgtgttaggggtatttagttggtggtgggttgggggtggggtgtattttgtttaaattttttggtttttttggtgggtttttttgaatgtggtgtggatttgtgtataggtttttgttttgtaggtttttaggtgtgtttggttttttttttgttttgtggggtaggtttttagtggttttttgggtgtatgtttggatattattgtttgttttgttgttgttttttatggttttaaagatatatgttgtttgtatgtgtttttgggggatgatagtgttatatgtggatatattggttttagtttggatttgtttttgtttttttttgtttgtgttgttggaagttgttttgggttgttggagtttttgggttttggagatgaaggtaggtttttgtttttgttaggaaggagggaggtagtgggtttatgggttggtgtttttgtagttgatagtatgttttgtggttttggggatttttttgtgttttggtgagattttttttgttttattgtattggaattttatttttgattatatgttgggatttattattggattttaagaggagtttgtgtagtttagttggtattttgaagttttttttttagtgggaattgaagtagaagagtgattaaggaggtttttattataggatttatgggtttgattatgggttttttgtaggtttttttggtagttttttttttatttgttgttttgggttgtgtttttgttgttgttgttgtaatttttagtattgttgttttaggttttgtagttgttgtgttgttgttattttttaaagggtttgtagtttgattttgtggagtaagggggggtggagtgggggagttggttttgttagtgtgtatgtgtgaggtttgagttgttgtttgggttatagtgaaagttattgttgtttggggatgggtttttgatatttggggaagtaggagttttgtgtgattgtgtgtttgagtttgggttgagattagttttggttagggtagttattaggatggtttttggaggttgggatttgtggagggtttagtagtaggaagaaattttaggaggaagaaattttagatagattgttggtgaggtagtgtgggattttagttttaggtgtgtgtggatggtgtgtgggtgagtttttttaaaagtggagtttttgtgatgatgagtataggtttgtttgtgtgtttgtgggttgtttttttattggtggtttttagttgtggagagtagaatttggtagttttaggggttgtttgtgggagggtgttttttgttgtatgtgtgtgtttgttatgggtgtgtgtgtgtgtgtgttggggggggtgtgtttgtgtgtgtgtttgtgtgtgtgtgtgtgtagtgtttgtttgtgtgttgatttttgttttttttttatgtttttttttttttttttttttttttttttttttttttttgtttttttttttgttttttttgtggttttttttttttgtttttgtttgtttgtgtgtgtgtgtgttttgggatatatgtgttttgtgtgttggagggtgggttttttgtatgttggttttttttttggttagtttttttttgtgtttttgtttgggttgtgtggttggttggtagttgttgttttggtggttttagtttgggggtttgtgaaggtttgggtaatgtgggtattggtgttggatttgtaggggtttttattttttttttatttggagtagtttttttgttaggttggatttagatgagtgttttttaattaaggataatggttttttaggtgtttattgtttatttgtaggagggtgtttgtagagttttaagaaggtggttgttatgtttgttgttttttgtttttattgagaaatgtagttatagtttgatgtagggatggagaaggaagttggtaaggggatggggtaagtatgtttgttttttaaaggttggtttttttggttgagttatttgtttgatatttttttttggatgttggtggtggtggtatggtttttttgtattttgtttgggttttggtttttgttttgattttttttttgttgtgtttgttttgtttttgagaagtttggtggttttttagtgtggtttagtgttttttataaagaagatttttttgtttattagggagaaattttgtggtggtttgtgttatgattgtttttttttttatatttttttttggatgattgggtagttgtggtgattttggagttttgggtttttatatttgtgtgggatagggaagttttttgggtttttatggtttaagtgatggttgtatgtttggtttaggaagaggtggaggtaagtttattgtttttgatattggttttttaggaaaggtggtgttgtattttatatgtattttttttttgatttttgagggttaattgttttttttgtttttggggaaagtgttttttagtattgaattttttggttgttatggatgttagggagttaatgggattgggttttggttgggtgtaggggaggttgtgttaggggtatttagttggtggtgggttgggggtggggtgtattttgtttaaattttttggtttttttggtgggtttttttgaatgtggtgtggatttgtgtataggttttgttttgtaggtttttaggtgtgtttggttttttttttgttttgtggggtaggtttttagtggttttttgggtgtatgtttggatattattgtttgttttgttgttgttttttatggttttaaagatatatgttgtttgtatgtgtttttgggggatgatagtgttatatgtggatatattggttttagtttggatttgtttttgtttttttttgtttgtgttgttggaagttgttttgggttgttggagtttttgggttttggagatgaaggtaggtttttgtttttgttaggaaggagggaggtagtgggtttatgggttggtgtttttgtagttgatagtatgttttgtggttttggggatttttttgtgttttggtgagattttttttgttttattgtattggaattttatttttgattatttgttgggatttattattggattttaagaggagtttgtgtagtttagttggtattttgaagttttttttttagtgggaattgaagtagaagagtgattaaggaggtttttattataggatttttatgggtttgattttgggttttttgtaggtttttttggtagttttttttttatttgttgttttgggttgtgtttttgttgttgttgttgtaatttttagtattgttgttttaggttttgtagttgttgtgttgttgttattttttaaagggtttgtagtttgattttgtggagtaatggggggtggagtgggggagttggttttgttagtgtgtatgtgtgaggtttgagttgttgtttgggttatagtgaaagttattgttgtttggggatgggtttttgatatttggggaagtaggagttttgtgtgattgtgtgtttgagtttgggttgagattagttttggttagggtagttattaggatggtttttggaggttgggatttgtggagggtttagtagtaggaagaaattttaggaggaagaaattttagatagattgttggtgaggtagtgtgggattttagttttaggtgtgtgtggatggtgtgtgggtgagtttttttaaaagtggagtttttgtgatgatgagtataggtttgtttgtgtgtttgtgggttgtttttttattggtggtttttagttgtggagagtagaatttggtagttttaggggttgtttgtgggagggtgttttttgttgtatgtgtgtgtttgttatgggtgtgtgtgtgtgtgtgttggggggggtgtgtttgtgtgtgtgtttgtgtgtgtgtgtgtgtagtgtttgtttgtgtgttgatttttgttttttttttatgtttttttttttttttttttttttttttttttttttttttttttttttttgtttttttttttgttttttttgtggttttttttttttgtttttgtttgtttgtgtgtgtgtgtgttttgggatatatgtgttttgtgtgttggagggtgggttttttgtatgttggttttttttttggttagtttttttttgtgtttttgtttgggttgtgtggttggttggtagttgttgttttggtggttttagtttgggggtttgtgaaggtttgggtaatgtgggtattggtgttggatttgtaggggtttttattttttttttatttggagtagtttttttgttaggttggatttagatgagtgttttttaattaaggataatggttttttaggtgtttattgtttatttgtaggagggtgtttgtagagttttaagaaggtggttgttatgtttgttgttttttgtttttattgagaaatgtagttatagtttgatgtagggatggagaaggaagttggtaaggggatggggtaagtatgtttgttttttaaaggttggtttttttggttgagttatttgtttgatatttttttttggatgttggtggtggtggtatggtttttttgtattttgtttgggttttggtttttgttttgattttttttttgttgtgtttgttttgtttttgagaagtttggtggttttttagtgtggtttagtgttttttataaagaagatttttttgtttattagggagaaattttgtggtggtttgtgttatgtttgtttttttttttatatttttttttggatgattgggtagttgtggtgattttggagttttgggtttttatatttgtgtgggatagggaagtttttttggtttttatggtttaagtgatggttgtatgtttggtttaggaagaggtggaggtaagtttattgtttttgatattggttttttaggaaaggtggtgttgtattttatttgtattttttttttgatttttgagagttaattgttttttttgtttttggggaaagtgttttttagtattgaatgttttggttgttatggatgttagggagttaatgggattgggttttggttgggtgtaggggaggttgtgttaggggtatttagttggtggtgggttgggggtggggtgtattttgtttaaattttttggtttttttggtgggtttttttgaatgtggtgtggatttgtgtataggttttgttttgtaggtttttaggtgtgtttggttttttttttgttttgtggggtaggtttttagtggttttttgggtgtatgtttggatattattgtttgttttgttgttgttttttatggttttaaagatatatgttgtttgtatgtgtttttgggggatgatagtgttatatgtggatatgttggttttagtttggatttgtttttgtttttttttgtttgtgttgttggaagttgttttgggttgttggagtttttgggttttggagatgaaggtaggtttttgtttttgttaggaaggagggaggtagtgggtttatgggttggtgtttttgtagttgatagtatgttttgtggttttggggatttttttgtgttttggtgagattttttttgttttattgtattggaattttatttttgattatttgttgggatttattattggattttaagaggagtttgtgtagtttagttggtattttgaagttttttttttagtgggaattgaagtagaagagtgattaaggaggtttttattataggatttttatgggtttgattatgggttttttgtaggtttttttggtagttttttttttatttgttgttttgggttgtgtttttgttgttgttgttgtaatttttagtattgttgttttaggttttgtagttgttgtgttgttgttattttttaaagggtttgtagtttgattttgtggagtaagggggggtggagtgggggagttggttttgttagtgtgtatgtgtgaggtttgagttgttgtttgggttatagtgaaagttattgttgtttggggatgggtttttgatatttggggaagtaggagttttgtgtgattgtgtgtttgagtttgggttgagattagttttggttagggtagttattaggatggtttttggaggttgggatttgtggagggtttagtagtaggaagaaattttaggaggaagaaattttagatagattgttggtgaggtagtgtgggattttagttttaggtgtgtgtggatggtgtgtgggtgagtttttttaaaagtggagtttttgtgatgatgagtataggtttgtttgtgtgtttgtgggttgtttttttattggtggtttttagttgtggagagtagaatttggtagttttaggggttgtttgtgggagggtgttttttgttgtatgtgtgtgtttgttatgggtgtgtgtgtgtgtgtgttgggggggtgtgtttgtgtgtgtgtttgtgtgtgtgtgtgtgtagtgtttgtttgtgtgttgatttttgttttttttttatgtttttttttttttttttttttttttttttttttttttttttttttttttttttttgttttttttgtggttttttttttttgtttttgtttgtttgtgtgtgtgtgtgttttgggatatatgtgttttgtgtgttggagggtgggttttttgtatgttggttttttttttggttagtttttttttgtgtttttgtttgggttgtgtggttggttggtagttgttgttttggtggttttagtttgggggtttgtgaaggtttgggtaatgtgggtattggtgttggatttgtaggggtttttattttttttttatttggagtagtttttttgttaggttggatttagatgagtgttttttaattaaggataatggttttttaggtgtttattgtttatttgtaggagggtgtttgtagagttttaagaaggtggttgttatgtttgttgttttttgtttttattgagaaatgtagttatagtttgatgtagggatggagaaggaagttggtaaggggatggggtaagtatgtttgttttttaaaggttggtttttttggttgagttatttgtttgatatttttttttggatgttggtggtggtggtatggtttttttgtattttgtttgggttttggtttttgtttttattttttttttgttgtgtttgttttgtttttgagaagtttggtggttttttagtgtggtttagtgttttttataaagaagatttttttgtttattagggagaaattttgtggtggtttgtgttatgattgtttttttttttatatttttttttggatgattgggtagttgtggtgattttggagttttgggtttttatatttgtgtgggatagggaagtttttttggtttttatggtttaagtgatggttgtatgtttggtttaggaagaggtggaggtaagtttattgtttttgatattggttttttaggaaaggtggtgttgtattttatttgtattttttttttgatttttgagggttaattgttttttttgtttttggggaaagtgttttttagtattgaattttttggttgttatggatgttagggagttaatgggattgggttttggttgggtgtaggggaggttgtgttaggggtatttagttggtggtgggttgggggtggggtgtattttgtttaaattttttggtttttttggtgggtttttttgaatgtggtgtggatttgtgtataggttttgttttgtaggtttttaggtgtgtttggttttttttttgttttgtggggtaggtttttagtggttttttgggtgtatgtttggatattattgtttgttttgttgttgttttttatggttttaaagatatatgttgtttgtatgtgtttttgggggatgatggtgttatatgtggatatattggttttagtttggatttgtttttgtttttttttgtttgtgttgttggaagttgttttgggttgttggagtttttgggttttggagatgaaggtaggtttttgtttttgttaggaaggagggaggtagtgggtttatgggttggtgtttttgtagttgatagtatgttttgtggttttggggatttttttgtgttttggtgagattttttttgttttattgtattggaattttatttttgattatttgttgggatttattattggattttaagaggatattttaagaggagtttgtgtagtttagttggtattttgaagttttttttttagtgggaattgaagtagaagagtgattaaggaggtttttattataggatttttatgggtttgattttgggttttttgtaggtttttttggtagttttttttttatttgttgttttgggttgtgtttttgttgttgttgttgtaatttttagtattgttgttttaggttttgtagttgttgtgttgttgttattttttaaagggtttgtagtttgattttgtggagtaagggggggtggagtgggggagttggttttgttagtgtgtatgtgtgaggtttgagttgttgtttgggttatagtgaaagttattgttgtttggggatgggtttttgatatttggggaagtaggagttttgtgtgattgtgtgtttgagtttgggttgagattagttttggttagggtagttattaggatggtttttggaggttgggatttgtggagggtttagtagtaggaagaaattttaggaggaagaaattttagatagattgttggtgaggtagtgtgggattttagttttaggtgtgtgtggatggtgtgtgggtgagtttttttaaaagtggagtttttgtgatgatgagtataggtttgtttgtgtgtttgtgggtggtttttttattgttggtttttagttgtggagagtagaatttggtagttttaggggttgtttgtgggagggtgttttttgttgtatgtgtgtgtttgttatgggtgtgtgtgtttgtgtgttggggggggtgtgtttgtgtgtgtgtgtgtgtagtgtttgtttgtgtgtggatttttgttttttttttaggtttttttttttttttttttttttttttttgttttttttgtggttttttttttttgtttttgtttgtttgtgtgtgtgtgtgttttgggatatatgtgttttgtgtgttggagggtgggttttttgtatgttggttttttttttggttagtttttttttgtgtttttgtttgggttgtgtggttggttggtagttgttgttttggtggttttagtttgggggtttgtgaaggtttgggtaatgtgggtattggtgttggatttgtaggggtttttattttttttttatttggagtagtttttttgttaggttggatttagatgagtgttttttaattaaggataatggttttttaggtgtttattgtttatttgtaggagggtgtttgtagagttttaagaaggtggttgttatgtttgttgttttttgtttttattgagaaatgtagttatagtttgatgtagggatggagaaggaagttggtaaggggatggggtaagtatgtttgttttttaaaggttggtttttttggttgagttatttgtttgatatttttttttggatgttggtggtggtggtatggtttttttgtattttgtttgggttttggtttttgttttgattttttttttgttgtgtttgttttgtttttgagaagtttggtggttttttagtgtggtttagtgttttttataaagaagatttttttgtttattagggagaaattttgtggtggtttgtgttatgtttgtttttttttttatatttttttttggatgattgggtagttgtggtgattttggagttttgggtttttatatttgtgtgggatagggaagtttttttggtttttatggtttaagtgatggttgtatgtttggtttaggaagaggtggaggtaagtttattgtttttgatattggttttttaggaaaggtggtgttgtattttatttgtattttttttttgatttttgagggttaattgttttttttgtttttggggaaagtgttttttagtattgaattttttggttgttatggatgttagggagttaatgggattgggttttggttgggtgtaggggaggttgtgttaggggtatttagttggtggtgggttgggggtggggtgtattttgtttaaattttttggtttttttggtgggtttttttgaatgtggtgtggatttgtgtataggttttgttttgtaggtttttaggtgtgtttggttttttttttgttttgtggggtaggtttttagtggttttttgggtgtatgtttggatattattgtttgttttgttgttgttttttatggttttaaagatatatgttgtttgtatgtgtttttgggggatgatagtgttatatgtggatatattggttttagtttggatttgtttttgtttttttttgtttgtgttgttggaagttgttttgggatgttggagtttttgggttttggagatgaaggtaggtttttgtttttgttaggaaggagggaggtagtgggtttatgggttggtgtttttgtagttgatagtatgttttgtggttttggggatttttttgtgttttggtgagattttttttgttttattgtattggaattttatttttgattatttgttgggatttattgttggattttaagaggagtttgtgtagtttagttggtattttgaagttttttttttagtgggaatggaagtagaagagtgattaaggaggtttttattataggatttttatgggtttgattttgggttttttgtaggtttttttggtagttttttttttatttgttgttttgggttgtgttgttgttgttgttgttgtaatttttagtattgttgttttaggttttgtagttgttgtgttgttgttattttttaaagggtttgtagtttgattttgtggagtaagggggggtggagtggggggagttggttttgttagtgtgtaggtgtgaggtttgagttgttgtttgggttatagtgaaagttattgttgtttggggatgggtttttgatatttggggaagtaggagttttgtgtgattgtgtgtttgagtttgggttgagattagttttggttagggtagttattaggatggtttttggaggttgggatttgtggagggtttagtagtaggaagaaattttaggaggaagaaattttagatagattgttggtgaggtagtgtgggattttagtttttggtgtgtgtggatggtgtgtgggtgagtttttttaaaagtggagtttttgtgatgatgagtataggtttgtttgtgtgtttgtgggttgtttttttattggtggtttgtagttgtg

SEQ ID NO: 167 - DNA, 17968 bp, Artificial Sequence
  chemically treated genomic DNA (Homo sapiens)
tgtgattatgagttattggtgagagagtagtttatgggtatataggtggatttgtgtttgttattataagggttttatttttggggagatttatttgtatattgtttgtgtatgttagaggttgggattttgtgttgttttgttggtgatttgtttgaggttttttttttttggggtttttttttgttgttggattttttgtgaattttggtttttggagattgttttggtaattgttttggttaggattggttttagtttagatttagatgtatgattatatagggtttttatttttttaagtgttagggatttatttttgggtaatggtggtttttattgtgatttaagtggtggtttgggttttgtgtttgtgtgttggtgaggttgattttttttgttttatttttttttattttgtagagttaggttgtggattttttaaaaaatggtggtgatgtggtggttgtggggtttggggtggtggtgttggaggttgtggtggtggtggtggtggtgtagtttgaggtgatgggtgggaagaggattgttagaggggtttgtgggagatttagggttggatttataggagttttgtggtgaggatttttttgattgtttttttgtttttgtttttgttgaaggaggagttttggggtgttggttgggttgtgtggattttttttggggtttgatgatggattttagtgggtgattgggaatggggttttaatgtagtgaggtggaaagggttttgttggggtataggaagatttttagggttgtaaggtgtgttgttggttgtaaaggtattgatttatgagtttattgttttttttttttttggtaggagtaggggtttgtttttatttttaaggtttgagggttttggtattttgaggtggtttttggtgatatgggtaaagagagatagaggtgagtttgagttggagttagtgtgtttatatgtggtattgttgttttttaagagtatatgtaggtagtgtgtgtttttgaggttgtagggggtgatgatgagatggatagtgatgtttaggtgtgtgtttggggggttattggagatttgttttataaagtggaggaaaagttaagtgtatttgaaaatttgtgagatagggtttgtgtgtgagtttatgttatgtttagggaggtttgttagaggagttgagaggtttggataaagtatattttatttttagtttgttgttggttaggtatttttgatgtaattttttttgtatttagttaaaatttagttttgttggttttttgatatttgtggtagttaaaagatttggtgttagaaggtattttttttaggagtggaggaagtggttggtttttaagaattagagaggaagtgtaggtgggatgtaatattgttttttttagaaggttaatgttaggagtggtgggtttgtttttgtttttttttggattgagtgtgtagttattatttgggttatggagattgagagagtttttttgttttatataggtatggaagtttagagttttaggattattatagttgtttaattatttagaaagaggtgtggagagggaaataagtatgatgtggattgttatgaggtttttttttgatggatggggaagttttttttgtggaagatattgagttatattaagaagttgttaggttttttagagatggggtagatatagtaagagggaggttagagtagaggttagagtttaggtaggatatgggggggttatgttattattattggtatttggggaggagtgttaaatgggtgatttggttaggaaggttagtttttgagagatagatatgtttgttttatttttttgttggtttttttttttgtttttgtgttgagttgtggttatattttttgatgagggtagagggtgataggtgtgataattatttttttgaagttttgtgggtatttttttgtgggtggatgatgagtgtttgggaggttgttgtttttggttggggagtgtttgtttggatttagtttagtaaagaggttgttttggatggggaggggatgaaaatttttgtgggtttgatgttgatgtttatgttgtttaggtttttatagatttttaaattggaattgttgggatgatgattgttaattggttatatgatttaggtagagatgtggggagaggttgattagaagaaaggttgatgtgtaagaaatttattttttggtgtatagggtatatgtgttttgaggtgtatgtatatatagatggatagagatagaaagagagggttatggaaagagtgagaagggagagagagagagagagagagatttgagagagagatagaagtttgtatatagataggtattgtgtgtgtatatatatagatgtattttttttaatatataaatatatatatttatgatgaatatatatgtatagtagggaatatttttttgtaggtagtttttgaagttgttgggttttgttttttgtgattgagagttagtggtgagagagttgtttatgggtatgtaggtggatttgtgtttgttattataagggttttatttttggggagatttatttgtatattgtttgtgtatgtttgaggttgggattttgtgttgttttgttggtgatttgtttgaggttttttttttttggggtttttttttgttgttggattttttgtgaattttggtttttggagattgttttggtaattgttttggttaggattggttttagtttagatttagatgtatgattatatagggtttttatttttttaagtgttagggatttatttttgggtaatggtggtttttattgtgatttaagtggtggtttgggttttgtgtatgtgtgttggtgaggttgatttttttgttttatttttttttattttgtagagttaggttgtggattttttaaaaaatggtggtgatgtggtggttgtggggtttggggtggtggtgttggaggttgtggtggtggtggtgaaggtgtagtttgaggtggtgggtgggaagaggattgttagaggggtttgtgggagatttagggttggatttataggagttttgtggtgaggatttttttgattgtttttttgttttggtttttattgaaggaggagttttggggtgttggttgggttgtgtggattttttttggggtgtttttttggggtttgatgatggattttagtgggtgattgggaatggggttttaatgtagtgaggtggaaagggttttgttggggtataggaagatttttagggttgtaaggtgtgttgttggttgtaaaggtattgatttatgagtttattgttttttttttttttggtaggagtaggggtttgtttttatttttaaggtttgagggttttggtaatttgaggtggtttttggtgatatgggtaaagagagatagaggtgagtttgagttggagttagtgtgtttatatgtggtattgttgttttttaagagtatatgtaggtagtgtgtgtttttgaggttgtagggggtgatgatgagatggatagtgatgtttaggtgtgtgtttggggggttattggagatttgttttataaagtggaggaaaagttaagtgtatttgaaaatttgtgagatagggtttgtgtgtgagtttatgttatgtttagggaggtttgttagaggagttgagaggtttggataaagtatattttatttttagtttgttgttggttaggtatttttgatgtaattttttttgtatttagttaaaatttagttttgttggttttttgatatttgtggtagttaaaagatttggtgttagaaggtattttttttaggagtggaggaagtggttggtttttaagaattagagaggaagtgtaggtgggatgtaatattgttttttttagaaggttaatgttaggagtggtgggtttgtttttgtttttttttggattgagtgtgtagttattatttgggttatggagattgagagagtttttttgttttatataggtatggaagtttagagttttaggattattatagttgtttaattatttagaaagaggtgtggagagggaaataattatgatgtggattgttatgaggtttttttttgatggatggggaagttttttttgtggaagatattgagttatattaagaagttgttaggttttttagagatggggtagatatagtaagagggaggtgagagtagaggttagagtttaggtaggatatgggggggttatgttattattattggtatttggggaggagtgttaaatgggtgatttggttaggaaggttagtttttgagagatagatatgtttgttttatttttttgttggtttttttttttgtttttgtgttgagttgtggttatattttttgatgagggtagagggtgataggtgtgataattatttttttgaagttttgtgggtatttttttgtgggtggatgatgagtgtttgggaggttgttgtttttggttggggagtgtttgtttggatttagtttagtaaagaggttgttttggatggggaggggatgaaaatttttgtgggtttgatgttgatgtttatgttgtttaggtttttatagatttttaaattggaattgttgggatgatgattgttaattggttatatgatttaggtagagatgtggggagaggttgattagaagaaaggttgatgtgtaagaaatttattttttggtgtatagggtatatgtgttttgaggtgtatgtatatatagatggatagagatagaaagagagggttatggaaagagtgagaagggagagagggagagggagagagagagagagagagagagagagagagagatgtgagagagagatagaagttggtatatagataggtattgtgtgtgtatatatatagatatatatatagatgtatttttttaatatatatatatatatatttatgatgaatatatatgtatagtagggaatatttttttgtaggtagtttttgaagttgttgggttttgttttttgtgattgagagttattggtgagagagtagtttatgggtatgtaggtggatttgtgtttgttattataagggttttatttttggggagatttatttgtatattgtttgtgtatgtttgaggttgggattttgtgttgttttgttggtgatttgtttgaggttttttttttttggggtttttttttgttgttggattttttgtgaattttggtttttggagattgttttggtaattgttttggttaggattggttttagtttagatttagatgtatgattatatagggtttttatttttttaagtgttagggatttatttttgggtaatggtggtttttattgtgatttaagtggtggtttgggttttgtgtatgtgtgttggtgaggttgatttttttgttttatttttttttattttgtagagttaggttgtggattttttaaaaaatggtggtgatgtggtggttgtggggtttggggtggtggtgttggaggttgtggtggtggtggtgaaggtgtagtttgaggtggtgggtggggagaggattgttagaggggtttgtgggagatttatggttggatttataggagttttgtggtgaggatttttttgattgtttttttgttttggtttttattgaaggaggagttttggggtgttggttgggttgtgtggattttttttggggtttgatgatggattttagtgggtgattgggaatggggttttaatgtagtgaggtggaaagggttttgttggggtataggaagatttttagggttgtaaggtgtgttgttggttgtaaaggtattgatttatgagtttattgttttttttttttttggtaggagtaggggtttgtttttatttttaaggtttgagggttttggtaatttgaggtggtttttggtgatatgggtaaagagagatagaggtgagtttgagttggagttagtgtgtttatatgtggtattgttgttttttaagagtatatgtaggtagtgtgtgtttttgaggttgtagggggtgatgatgagatggatagtgatgtttaggtgtgtgtttggggggttattggagatttgttttataaagtggaggaaaagttaagtgtatttgaaaatttgtgagatagggtttgtgtgtgagtttatgttatgtttagggaggtttgttagaggagttgagaggtttggataaagtatattttatttttagtttgttgttggttaggtatttttgatgtaattttttttgtatttagttaaaatttagttttgttggttttttgatatttgtggtagttaaaatatttggtgttagaaggtattttttttaggagtggaggaagtggttggtttttaagaattagagaggaagtgtaggtgggatgtaatattgttttttttagaaggttaatgttaggagtggtgggtttgtttttgtttttttttggattgagtgtgtagttattatttgggttatggagattgagagagtttttttgttttatataggtatggaagtttagagttttaggattattatagttgtttaattatttagaaagaggtgtggagagggaaataagtatgatgtggattgttatgaggtttttttttgatggatggggaagttttttttgtggaagatattgagttatattaagaagttgttaggttttttagagatggggtagatatagtaagagggaggttagagtagaggttagagtttaggtaggatatgggggggttatgttattattattggtatttggggaggagtgttaaatgggtgatttagttaggaaggttagtttttgagagatagatatgtttgttttatttttttgttggtttttttttttgtttttgtgttgagttgtggttatattttttgatgagggtagagggtgataggtgtgataattatttttttgaagttttgtgggtatttttttgtgggtggatgatgagtgtttgggaggttgttgtttttggttggggagtgtttgtttggatttagtttagtaaagaggttgttttggatggggaggggatgaaaatttttgtgggtttgatgttgatgtttatgttgtttaggtttttatagatttttaaattggaattgttgggatgatgattgttaattggttatatgatttaggtagagatgtggggagaggttgattagaagaaaggttgatgtgtaagaaatttattttttggtgtatagggtatatgtgttttgaggtgtatgtatatatagatggatagagatagaaagagagggttatggaaagagtgagaagggagatagagagagagagagagagagagagagagagagagagagagagagagagatgtgagagagagatagaagttggtatatagataggtattgtgtgtgtatatatatagatatatatatagatgtattttttttaatatatatatatatatatttatgatgaatatatatgtatagtagggaatatttttttgtaggtagtttttgaagttgttgggttttgttttttgtgattgagagttattggtgagagagtagtttatgggtatgtaggtggatttgtgtttgttattataagggttttatttttggggagatttatttgtatattgtttgtgtatgtttgaggttgggattttgtgttgttttgttggtgatttgtttgaggttttttttttttggggtttttttttgttgttggattttttgtgaattttggtttttggagattgttttggtaattgttttggttaggattggttttagtttagatttagatgtatgattatatagggtttttatttttttaagtgttagggatttatttttgggtaatggtggtttttattgtgatttaagtggtggtttgggttttgtgtatgtgtgttggtgaggttgatttttttgttttattttttgttattttgtagagttaggttgtggattttttaaaaaatggtggtgatgtggtggttgtggggtttggggtggtggtgttggaggttgtggtggtggtggtgaaggtgtagtttgaggtggtgggtgggaagaggattgttagaggggtttgtgggagatttagggttggatttataggagttttgtggtgaggatttttttgattgtttttttgttttggtttttattgaaggaggagttttggggtgttggttgggttgtgtggattttttttggggtttgatgatggattttagtgggtgattgggaatggggttttaatgtagtgaggtggaaagggttttgttggggtataggaagatttttagggttgtaaggtgtgttgttggttgtaaaggtattgatttatgagtttattgttttttttttttttggtaggagtaggggtttgtttttatttttaaggtttgagggttttggtaatttgaggtggtttttggtgatatgggtaaagagagatagaggtgagtttgagttggagttagtgtgtttatatgtggtattgttgttttttaagagtatatgtaggtagtgtgtgtttttgaggttgtagggggtgatgatgagatggatagtgatgtttaggtgtgtgtttggggggttattggagatttgttttataaagtggaggaaaagttaagtgtatttgaaaatttgtgagatagggtttgtgtgtgagtttatgttatgtttagggaggtttgttagaggagttaagaggtttggataaagtatattttatttttagtttgttgttggttaggtatttttgatgtaattttttttgtatttagttaaaatttagttttgttggttttttgatatttgtggtagttaaaagatttggtgttagaaggtattttttttaggagtggaggaagtggttggtttttaagaattagagaggaagtgtatgtgggatgtaatattgttttttttagaaggttaatgttaggagtggtgggtttgtttttgtttttttttggattgagtgtgtagttattatttgggttatggagatttagagagtttttttgttttatataggtatggaagtttagagttttaggattattatagttgtttaattatttagaaagaggtgtggagagggaaataattatgatgtggattgttatgaggtttttttttgatggatggggaagttttttttgtggaagatattgagttatattaagaagttgttaggttttttagaggtggggtagatatagtaagagggaggttagagtagaggttagagtttaggtaggatatgggggggttatgttattattattggtatttggggaggagtgttaaatgggtgatttggttaggaaggttagtttttgagagatagatatgtttgttttatttttttgttggtttttttttttgtttttgtgttgagttgtggttatattttttgatgagggtagagggtgataggtgtgataattatttttttgaagttttgtgggtatttttttgtgggtggatgatgagtgtttgggaggttgttgtttttggttggggagtgtttgtttggatttagtttagtaaagaggttgttttggatggggaggggatgaaaatttttgtgggtttgatgttgatgtttatgttgtttaggtttttatagatttttaaattggaattgttgggatgatgattgttaattggttatatgatttaggtagagatgtggggagaggttgattagaagaaaggttgatgtgtaagaaatttattttttggtgtatagggtatatgtgttttgaggtgtatgtatatatagatggatagagatagaaagagagggttatggaaagagtgagaagggagatagagagagagagagagagagagagagagagagagagagatgtgagagagagatagaagttggtatatagataggtattgtgtgtgtatatatatagatatatatatagatgtattttttttaatatatatatatatatatttatgatgaatatatatgtatagtagggaatatttttttgtaggtagtttttgaagttgttgggttttgttttttgtgattgagagttattggtgagagagtagtttatgggtatgtaggtggatttgtgtttgttattataagggttttatttttggggagatttatttgtatattgtttgtgtatgtttgaggttgggattttgtgttgttttgttggtgatttgtttgaggttttttttttttggggtttttttttgttgttggattttttgtgaattttggtttttggagattgttttggtaattgttttggttaggattggttttagtttagatttagatgtatgattatatagggtttttatttttttaagtgttagggatttatttttgggtaatggtggtttttattgtgatttaagtggtggtttgggttttgtgtatgtgtgttggtgaggttgatttttttgttttatttttttttattttgtagagttaggttgtggattttttaaaaaatggtggtgatgtggtggttgtggggtttggggtggtggtgttggaggttgtggtggtggtggtgaaggtgtagtttgaggtggtgggtgggaagaggattgttagaggggtttgtgggagatttatggttggatttatgagttttgtggtgaggatttttttgattgtttttttgttttggtttttattgaaggaggagttttggggtgttggttgggttgtgtggattttttttggggtttgatgatggattttagtgtgtgattgggaatggggttttaatgtagtgaggtggaaagggttttgttggggtataggaagatttttagggttgtaaggtgtgttgttggttgtaaaggtattgatttatgagtttattgttttttttttttttggtaggagtaggggtttgtttttatttttaaggtttgagggttttggtaatttgaggtggtttttggtgatatgggtaaagagagatagaggtgagtttgagttggagttagtgtgtttatatgtggtattgttgttttttaagagtatatgtaggtagtgtgtgtttttgaggttgtagggggtgatgatgagatggatagtgatgtttaggtgtgtgtttggggggttattggagatttgttttataaagtggaggaaaagttaagtgtatttgaaaatttgtgagataggggtttgtgtgtgagtttatgttatgtttagggaggtttgttagaggagttgagaggtttggataaagtatattttatttttagtttgttgttggttaggtatttttgatgtaattttttttgtatttagttaaaatttagttttgttggttttttgatatttgtggtagttaaaatatttggtgttagaaggtattttttttaggagtggaggaagtggttggtttttaagaattagagaggaagtgtaggtgggatgtaatattgttttttttagaaggttaatgttaggagtggtgggtttgtttttgtttttttttggattgagtgtgtagttattatttgggttatggagattgagagagtttttttgttttatataggtatggaagtttagagttttaggattattatagttgtttaattatttagaaagaggtgtggagagggaaataattatgatgtggattgttatgaggtttttttttgatggatggggaagttttttttgtggaagatattgagttatattaagaagttgttaggttttttagaggtggggtagatatagtaagagggaggttagagtagaggttagagtttaggtaggatatgggggggttatgttattattattggtatttggggaggagtgttaaatgggtgatttggttaggaaggttagtttttgagagatagatatgtttgttttatttttttgttggtttttttttttgtttttgtgttgagttgtggttatattttttgatgagggtagagggtgataggtgtgataattatttttttgaagttttgtgggtatttttttgtgggtggatgatgagtgtttgggaggttgttgtttttggttggggagtgtttgtttggatttagtttagtaaagaggttgttttggatggggaggggatgaaaatttttgtgggtttgatgttgatgtttatgttgtttaggtttttatagatttttaaattggaattgttgggatgatgattgttaattggttatatgatttaggtagagatgtggggagaggttgattagaagaaaggttgatgtgtaagaaatttattttttggtgtatagggtatatgtgttttgaggtgtatgtatatatagatggatagagatagaaagagagggttatggaaagagtgagaagggagatagagagagagagagtgagagagagagagagagagagagagagagagagagagagagagatgtgagagagagatagaagttggtatatagataggtattgtgtgtgtatatatatagatatatatatagatgtattttttttaatatatatatatatatatttatgatgaatatatatgtatagtagggaatatttttttgtaggtagtttttgaagttgttgggttttgttttttgtgattgagagttattggtgagagagtagtttatgggtatgtaggtggatttgtgtttgttattataagggttttatttttggggagatttatttgtatattgtttgtgtatgtttgaggttgggattttgtgttgttttgttggtgatttgtttgaggttttttttttttggggtttttttttgttgttggattttttgtgaattttggtttttggagattgttttggtaattgttttggttaggattggttttagtttagatttagatgtatgattatatagggtttttatttttttaagtgttagggatttatttttgggtaatggtggtttttattgtgatttaagtggtggtttgggttttgtgtatgtgtgttggtgaggttgatttttttgttttatttttttttattttgtagagttaggttgtggattttttaaaaaatggtggtgatgtggtggttgtggggtttggggtggtggtgttggaggttgtggtggtggtggtgaaggtgtagtttgaggtggtgggtggggagaggattgttagaggggtttgtgggagatttatggttggatttataggagttttgtggtgaggatttttttgattgtttttttgttttggtttttattgaaggaggagttttggggtgttggttgggttgtgtggattttttttggggtttgatgatggattttagtgggtgattgggaatggggttttaatgtagtgaggtggaaagggttttgttggggtataggaagatttttagggttgtaaggtgtgttgttggttgtaaaggtattgatttatgagtttattgttttttttttttttggtaggagtaggggtttgtttttatttttaaggtttgagggttttggtaatttgaggtggtttttggtgatatgggtaaagagagatagaggtgagtttgagttggagttagtgtgtttatatgtggtattgttgttttttaagagtatatgtaggtagtgtgtgtttttgaggttgtagggggtgatgatgagatggatagtgatgtttaggtgtgtgtttggggggttattggagatttgttttataaagtggaggaaaagttaagtgtatttgaaaatttgtgagatagggtttgtgtgtgagtttatgttatgtttagggaggtttgttagaggagttgagaggtttggataaagtatattttatttttagtttgttgttggttaggtatttttgatgtaattttttttgtatttagttaaaatttagttttgttggtttttgatatttgtggtagttaaaagatttggtgttagaaggtattttttttaggagtggaggaagtggttggtttttaagaattagagaggaagtgtaggtgggatgtaatattgttttttttagaaggttaatgttaggagtggtgggtttgtttttgtttttttttggattgagtgtgtagttattatttgggttatggagattgagagagtttttttgttttatataggtatggaagtttagagttttaggattattatagttgtttaattatttagaaagaggtgtggagagggaaataattatgatgtggattgttatgaggtttttttttgatggatggggaagttttttttgtggaagatattgagttatattaagaagttgttaggttttttagagatggggtagatatagtaagagggaggttagagtagaggttagagtttaggtaggatatgggggggttatgttattattattggtatttggggaggagtgttaaatgggtgatttggttaggaaggttagtttttgagagatagatatgtttgttttatttttttgttggtttttttttttgtttttgtgttgagttgtggttatattttttgatgagggtagagggtgataggtgtgataattatttttttgaagttttgtgggtatttttttgtgggtggatgatgagtgtttgggaggttgttgtttttggttggggagtgtttgtttggatttagtttagtaaagaggttgttttggatggggaggggatgaaaatttttgtgggtttgatgttgatgtttatgttgtttaggtttttatagatttttaaattggaattgttgggatgatgattgttaattggttatatgatttaggtagagatgtggggagaggttgattagaagaaaggttgatgtgtaagaaatttattttttggtgtatagggtatatgtgttttgaggtgtatgtatatatagatggatagagatagaaagagagggttatggaaagagtgagaagggagatagagagagagagagagagagagagagagagagagagatgtgagagagagatagaagttggtatatagataggtattgtgtgtgtatatatatagatatatatatagatgtattttttttaatatatatatatatatatttatgatgaatatatatgtatagtagggaatatttttttgtaggtagtttttgaagttgttgggttttgttttttgtgattgagagttattggtgagagagtagtttatgggtatgtaggtggatttgtgtttgttattataagggttttatttttggggagatttatttgtatattgtttgtgtatgtttgaggttgggattttgtgttgttttgttggtgatttgtttgaggttttttttttttggggtttttttttgttgttggattttttgtgaattttggtttttggagattgttttggtaattgttttggttaggattggttttagtttagatttagatgtatgattatatagggtttttatttttttaagtgttagggatttatttttgggtaatggtggtttttattgtgatttaagtggtggtttgggttttgtgtatgtgtgttggtgaggttgatttttttgttttatttttttttattttgtagagttaggttgtggattttttaaaaaatggtggtgatgtggtggttgtggggtttggggtggtggtgttggaggttgtggtggtggtggtgaaggtgtagtttgaggtggtgggtggggagaggattgttagaggggtttgtgggagatttatggttggatttataggagttttgtggtgaggatttttttgattgtttttttgttttggtttttattgaaggaggagttttggggtgttggttgggttgtgtggattttttttggggtttgatgatggattttagtgggtgattgggaatggggttttaatgtagtgaggtggaaagggttttgttggggtataggaagatttttagggttgtaaggtgtgttgttggttgtaaaggtattgatttatgagtttattgttttttttttttttggtaggagtaggggtttgtttttatttttaaggtttgagggttttggtaatttgaggtggtttttggtgatatgggtaaagagagatagaggtgagtttgagttggagttagtgtgtttatatgtggtattgttgttttttaagagtatatgtaggtagtgtgtgtttttgaggttgtagggggtgatgatgagatggatagtgatgtttaggtgtgtgtttggggggttattggagatttgttttataaagtggaggaaaagttaagtgtatttgaaaatttgtgagatagggtttgtgtgtgagtttatgttatgtttagggaggtttgttagaggagttgagaggtttggataaagtatattttatttttagtttgttgttggttaggtatttttgatgtaattttttttgtatttagttaaaatttagttttgttggttttttgatatttgtggtagttaaaagatttggtgttagaaggtattttttttaggagtggaggaagtggttggtttttaagaattagagaggaagtgtaggtgggatgtaatattgttttttttagaaggttaatgttaggagtggtgggtttgtttttgtttttttttggattgagtgtgtagttattatttgggttatggagattgagagagtttttttgttttatataggtatggaagtttagagttttaggattattatagttgtttaattatttagaaagaggtgtggagagggaaataattatgatgtggattgttatgaggtttttttttgatggatggggaagttttttttgtggaagatattgagttatattaagaagttgttaggttttttagagatggggtagatatagtaagagggaggttagagtagaggttagagtttaggtaggatatgggggggttatgttattattattggtatttggggaggagtgttaaatgggtgatttggttaggaaggttagtttttgagagatagatatgtttgttttatttttttgttggtttttttttttgtttttgtgttgagttgtggttatattttttgatgagggtagagggtgataggtgtgataattatttttttgaagttttgtgggtatttttttgtgggtggatgatgagtgtttgggaggttgttgtttttggttggggagtgtttgtttggatttagtttagtaaagaggttgttttggatggggaggggatgaaaatttttgtgggtttgatgttgatgtttatgttgtttaggtttttatagatttttaaattggaattgttgggatgatgattgttaattggttatatgatttaggtagagatgtggggagaggttgattagaagaaaggttgatgtgtaagaaatttattttttggtgtatagggtatatgtgttttgaggtgtatgtatatatagatggatagagatagaaagagagggttatggaaagagtgagaagggagatagagagagagagagagagagagagagagagatgtgagagagagatagaagttggtatatagataggtattgtgtgtgtatatatatagatatatatatagatgtatttttttaatatatatatatatatatttatgatgaatatatatgtatagtagggaatatttttttgtaggtagtttttgaagttgttgggttttgttttttgtgattgagagttattggtgagagagtagtttatgggtatgtaggtggatttgtgtttgttattataagggttttatttttggggagatttattttgtatattgtttgtgtatgtttgaggttggattttgtgttgttttgttggtgatttgtttgaggttttttttttttggggtttttttttgttgttggattttttgtgaattttggtttttggagatt

SEQ ID NO: 168 - DNA, 2730 bp, Artificial Sequence
  chemically treated genomic DNA (Homo sapiens)
gtttttatttgtgtgtttatgtgtgtggataaatgtgggaatttggtagtttttaatgttattttgtagagatttttgggttgtgagagagttggggtgtgtggtgggggaggggagggtttgatatttttaggttgagagttaagttttgggggagtggtatgggtgggggtggttggggggaggtggaggatggagtgtgaattagaaagtgtagaggatttttggtttgtgttgtatttgttgtgattagttttagaggtgtgatttgggagggtggatttttttttaatttttattgtttttttttttttttttttttttaaaagatgttttgtgggtagagttgttagtaattttgtggttgtttgtatttggttgtggtggagttgatttttgtttttgtgatagataggggttggggttgagtggttgtttgtttggggtatttgtatgtggggaataaattttttttttttggttttttttgggatttggtgattgttataggttgggattttgtgtggtgttggagttggtagttttgggtgttatggtttttttgaggagtggggagggaggtggttggggggttggtgtgttttttgtgtggggagtgttatgagttgggtgaagggtggtagtgatagttttagtaattgtttttgttggtgttttttgtaggtttttgttaatttgttttgtgtattatgttgatttttggtttgtggaatttgtagtgtagtttttgttgtttttttggtttttgttattttatgtaggattggttttggttgttggggttagtagtttgtgatgtgtttttggggaggtggaattgttgtgtgttttgagtttgggtttagttttttgttttttagttgtgttttgtttttggttgtttagggagtttagtggtgatgagggtattgttggtgttttgttttttttttggttggttgtgttggggtttggtgggtgtttagtagtttggagagtattgttatggttgggtggatgtgtagggtaattattatgagggtttttagtgtttagaggattttgatatgttggatgttattatttgttgtggtttttgtgtgttttgttattgttgtgttgtggttgatgttaggttggagtagggtggttgtattaatgattgttgtgaattggagtatttaggtattattgtgtgtaagtgtggggtttttggggatatatttttgtttgtttaatggtggtggttgtatgtgtgtgtgggaggatgtatagatttaggtaggtttatgtgtttttttgggtttgtgtgttagggggatgtggttgggtgggggaattaagggatgagtgggtggttgtgttttagattatggttttttatttatttgtagttttgttttttgttatttgtggtttttgtgggttggtttgtagggaaagtttgttagggatagtgaggagtgtggggtttgtgtttggtagttggggggaagatagttggagtttttgggagaagggtagtgtgggtaaagttagggtagatttgggttttggtggaggggttgagggtgttttattgtttgtttttgttattttgggagttttgggaagtgttgaatgtagggaattgtgatttttgttgtgtgtttatttgtagttttttagggttaagaaattttagttattttttttttttgttttaatgatagtgtttttaagttatggttttgttttgtagatttttttttaattttttgtattgaattattttttttggtttattttttattgttatgttttttagaaatgtttaggtttttgaggtggagatttagaaataagggttgaaggggtttttttgttttttatttttattttggaaaatatgggttaaatttttgttgattttagagtggaataaattatgattttagtagagaaaatttatattttgaaaaaaagttttttatttgaattggaatattagggaaatgttttagagtttgaggtgagggttttatggttagggaaattggagaagtgggtggagttgagagtgggtgatattttaggattttagagagttgaggtttggagtttgtaagagaaggttgttgggaaagggaagagaggttggagagattattaagggttttttaatggtttttttttgtaaattgataatttagaggataggggagtttgttttttattagtgttttattagagggtgaatgttgggggttaatatttttaatttagaggattttggaagtagttttggagaaaagatgtttagtggaaagtagggaaatttaggtttttttggtttgttagaaaaatatagatttttttttatggttttatttgtttattttgggggatttagttgttttttgggagtaagtgtaattgtttagtttgtagtatgggttttttttgtgttttttatttggtttggatgttagaggatagtagaagggagaggtagtttttatatttattgagtttgggattaggtaaattttgatggattttggttttgttatttgttggtggtgtaatttgggtaagttatttaattgttttggatatttttttttagttttaaagtgggtatattgtttttaaaggagttaagttgttggtgatgtgagagtgtatgaatgttggagtgtagggtttagtaaatggtagttatttatttttgttttgttttgtatgttg

SEQ ID NO: 169 - DNA, 2730 bp, Artificial Sequence
  chemically treated genomic DNA (Homo sapiens)
tagtgtgtaaggtaaggtaaaggtaagtaattattatttattgagttttgtgttttagtatttatatatttttatgttattaataatttaatttttttgagagtaatatgtttattttagaattgagaagaggtatttagagtagttaagtaatttgtttaagttatattgttggtaagtgatagagttaaggtttattagggtttgtttgattttagatttagtgagtgtggagattgttttttttttttgttgttttttggtatttgagttgagtagggagtgtagaggaagtttgtgttgtagattgggtaattgtatttatttttagagggtagttgggttttttagggtgagtgagtgaagttgtggggaagagtttatatttttttaataggttaggagggtttagatttttttattttttgttgagtattttttttttagaattatttttagaattttttagattggaaatgttgatttttaatatttattttttagtggagtattaatggagggtagatttttttgttttttgggttattagtttgtggggaggggttgttggggaatttttaatgatttttttagtttttttttttttttttggtgatttttttttgtgggttttagattttggttttttggagttttggggtgttatttgtttttagttttgtttgtttttttggtttttttggttataaaatttttgttttaagttttaaagtgtttttttgatgttttgatttaggtggaaaatttttttttaaggtgtaaattttttttgttggggttgtgatttattttgttttgaagttagtggaaatttgatttgtgttttttgaagtgagaatagggggtggggaagtttttttgatttttgtttttaaatttttattttgaagatttgggtatttttgaaaggtgtgataatagggggtgggttggagagggtaatttgatgtagagaattgaaaggaagtttgtagaatggggttgtggtttagaaatgttattattaagatagaaaaaaaaagtgattggggttttttagttttgaagggttgtaaatgagtgtgtgataagagttgtgattttttgtatttggtattttttgaagtttttgaagtgataagggtgagtaatgggatatttttggtttttttattaaaatttaagtttattttggttttatttgtattattttttttttgggagttttagttgttttttttttggttattaggtataagttttgtgttttttattgtttttggtaaattttttttgtgggttgatttgtagagattgtaagtggtgggaagtgggattgtaaatgaatagaggattatgatttgaaatgtgattatttatttattttttgatttttttatttggttgtgtttttttggtgtatagatttaggaaggtgtatagatttgtttgggtttgtgtatttttttgtgtatatatgtagttgttgttgttaggtgggtggggatatgtttttgagggttttgtatttatgtgtagtgatgtttgggtgttttagtttgtggtggttgttggtgtagttgttttgttttagtttggtgttggttgtggtgtaatagtagtggagtgtgtaggagttgtagtagatggtagtgtttagtgtgttgaagttttttgggtattggaagtttttgtggtagttgttttgtatgtttatttagttgtggtagtattttttggattgttgggtgtttgttgggttttagtgtagttagttaaggagaaggtaaagtgttagtagtgtttttattgttattgggttttttgggtggttgggagtaggatgtagttggaaagtgaagggttgagtttgggtttagggtgtatagtgattttgtttttttagggatatgttgtaagttgttggttttggtggttgaagttagttttgtgtgggatagtaggggttggggaggtgataggggttgtattatgagttttgtaggttgggagttagtatggtgtgtggggtgagttggtgagggtttgtgggaggtgttggtagaggtagttgttggggttgttgttgttgttttttgtttggtttatagtgttttttgtgtgaggggtgtgttaattttttggttatttttttttttattttttaagggagttatagtgtttggggttgttaattttagtgttgtatagagttttaatttgtggtgattgttgggttttgagaggagttggaggaaaagaatttgttttttatgtgtgagtattttagataggtggttgtttagttttagtttttatttgttataggagtaggagttagttttgttgtggttaagtataaatggttgtggggttgttgatagttttgtttgtaaggtgttttttaaaaaggaagagggaggaggagataatgagggttaagaaagagtttgtttttttggattgtgtttttggagttaattatagtgggtgtggtgtgggttgagggttttttgtgttttttggtttgtgttttattttttgtttttttttggttatttttgtttatgttgtttttttaggatttgatttttaatttgaagatattagattttttttttttttgttgtatattttaatttttttatagtttggaaatttttgtagagtgatgttgagggttgttgaatttttgtgtttatttatgtatgtgggtgtgtgagtggagat

SEQ ID NO: 170 - DNA, 2396 bp, Artificial Sequence
  chemically treated genomic DNA (Homo sapiens)
atttattattttaattattttaggtgtatagattataagtattaattatatttatattgttgtgtaatagatttgtagaaattatttattttgtaaaattgtagttattgaataatagttttttatttttttgttttttgtggtggttttaaatataatgtaatatatattagttgaaaatggaaaaaagaagtatatgaaaatgttaaatgtatagtataaaaaatgaataatagggttattttggttataattttaaatgagaaaatttaaagtaaaataataatttatgatatattatataaaatgtataatttaaaatttttaaaatttaatattaataaaaatatatgtaatatattatataagtatttaataaaattgaatataattatgtttaatttttttaaattgtgaaaaagattttattaatttttgaatatttatgtaaggaaattaagtatatttttttttgaaaaagtttgattttaattttttttttttttttttttttttgagatagagttttgttttattatttaggttggagtatagtggtgtgatattagtttattgtaagttttgttttttgggtttatgttatttttttgttttagttttttgagtagttgggattataggtgtttgttattgtgtttagttaatttttttttgtatttttagtagagatggggttttattgtggttttgattttttgattttgtgatttgtttgttttggttttttaaagtgttaggattataggtgtgagttattatgtttagttagtttgattttaattttaatagataggtgtttttgataattagtttatttttttattgaaattttttttttttttttttaaaaaattttaaatttttaatttttgtttttatttattttttttttgtttttaaaaggaaaggagtgtgtagttttgttgtttgtatattgtttatagtttttggtttggggtagggttttttaggttgtttgggggtttatatgtagtttttggggggttggtgtggggtgaggtttggttggttggggttgttgttaggtgtgttggttgggtagtttttgggagatgaagtgatgtaggtgttttaggtattggttgtagagtttgatgttgttgtgtttggtgttttttatttatagtggttttattgttttggggtagtgtttgtagagtgttagtttgtgtgagaagttgattattttgttttttatgttgtggatgatgagtatgggtgatgtgattttggatatttttttgatgttagggaaggtgttgaagtagtaggttttggtgttggggaaggtgatgtgtatgtttgaggtgagtggtgagtgtagtattattgtggtatatttgtagtgtgaggttaggtttatggtgggtattgtgttgatgttttgtttgtataggatgatgttgtttgggttgatgttgtatttggtggtgttggagtagggttagttgtggtttttgaggtgtgtgtattttttttattagtgggtgtttttgggtttagttttggatgtgattttttagtttttttatttagttaagttagtgggttaggtttaggttttatattagttttgagggttatttttagtttttaatattgtggtggtgggtgaggttagtggttttgttttgttttttggtgttgttgtttattggtgttttttagtaaggatttgtagggattttgtttatggagtgtttttggggtaggggtaggggaggttttggtgtttgttttttttttggttatttttaggtgtatattgggaattgtgtgttttttatattttgaatgttttaggtttttttgtttgggttagaaagttgtttttggtgtattggttaggatagtggatattttttttttttgtagtttttgtttatttttttggttatgaggaatttaggtagttgtgtttttagatgtttttatttaattttggatttttggagtttttatgtttaatgagatgttagtgtaatttaggttagtattgaaggtggtggttgtggaggtggtatttttttttattagtatttttttttgggagtggataagtttttggttattttagtattattagtttttatttagggttatttttatttttaggttattggtgtgtggtttttgatttagttgatttagtattagttataaggtttttttgtatttagttttaattatgtgggatttatttgttattttgtttatgttaggattttataattttttttttatatgttttaggttttgattttaggtagatatttttttgtaaggtaggagtatgggtaggtgtgtgttttttttgtttggtatttggattttattagtagggttgtttttgt

SEQ ID NO: 171 - DNA, 2396 bp, Artificial Sequence
  chemically treated genomic DNA (Homo sapiens)
atggggatagttttgttggtggagtttgaatgttaggtagaggggatgtatatttgtttatgtttttgttttgtaagagggtgtttgtttgggattagagtttggagtgtgtgggaggagagttgtggggttttggtatgggtagggtggtaggtgggttttgtgtggttgggattgggtatgaggaggttttgtaattggtgttggattagttgggttaagggttgtatattaatgatttgggggtgggggtggttttgggtgggagttggtggtgttgaggtggttgaggatttgtttatttttaagggaaggtgttggtgggagggggtgttatttttgtagttattatttttgatgttgatttgggttgtattggtattttattgggtgtggggattttgagagtttaaaattgggtggagatatttggggatatagttgtttgaattttttatggttaagggggtgggtaagggttgtaggaaggaagagtgtttgttgttttggttagtgtattaggaatggttttttaatttgggtagggaggtttgaagtatttaggatgtggggggtatatagtttttagtgtgtatttaggggtgattaggaggagaataggtgttagggttttttttatttttgttttaggggtattttgtaggtgggatttttgtagatttttgttaggaaatgttagtgaatggtagtgttagggaatggggtggggttgttggttttgtttattgttgtggtgttgggggttgggggtggtttttgggattggtgtggagtttgggtttgatttattgatttggttgagtggggagattagagggttgtatttggagttgggtttggggatgtttgttggtgggaagggtgtgtgtgttttggaggttgtggttgattttgttttggtgttgttaggtatggtattagtttggatagtattattttgtatgggtagagtattggtatggtgtttattgtggatttggttttgtgttatgagtgtgttgtggtggtgttgtatttgttgtttattttgggtatgtgtgttgttttttttgatattaagatttattgttttgatgttttttttaatattgagaaggtgtttaagattatgttgtttgtgtttattatttatggtatagaggatgaggtgattgattttttatatgggttggtgttttatgagtgttgttttaaggtggtggagttgttgtgggtggagggtgttggatataatgatattgagttttatagttagtatttggagtgtttgtgttgttttattttttaggagttgtttagttagtgtgtttagtggtggttttaattggttggattttattttgtgttggttttttaggggttgtatgtggatttttgggtggtttaggggattttgttttgagttaggggttgtggatgatgtataggtaatagagttatgtatttttttttttttggaagtaagaagaaaataagtgaaaatggaaattaaagatttaaaattttttaaaaaaagaaaaagaaaattttagtaagaaaataaattggttgttaaaaatatttgtttgttaaaattggaattaaattggttgggtgtggtggtttatgtttgtaattttggtattttgggaggttgaggtgggtagattatgaggttaagagattaagattatggtgaaattttgtttttattaaaaatataaaagaaaattagttgggtatagtggtgggtgtttatagttttagttatttgggaggttgaggtaggagaatggtgtgaatttgggaggtggagtttgtagtgagttgatattatgttattgtattttagtttgggtgatagagtaagattttgttttaaaaaaaaaaaaagaaaaaaaaaattggaattaaatttttttaagaagagatgtatttggtttttttgtgtaaatatttaaaagttaataggattttttttatagtttaaaaaaattaaatataattgtatttagttttattgaatatttatgtggtgtattatatatatttttgttaatattaaattttaaaaattttaaattgtgtattttatatgatatattatagattgttgttttattttgagtttttttatttaaagttataattaaagtgattttattatttattttttgtgttatgtatttaatatttttatatattttttttttttatttttagttagtatgtattgtattgtatttaaaattattataagaggtaggaaaatggggagttgttatttaatagttatagttttgtaagatggataatttttgtagatttgttgtatagtaatgtgaatatagttaatatttatgatttgtatatttaaaatgattaagatggtaaat

SEQ ID NO: 172 - DNA, 3190 bp, Artificial Sequence; identical to SEQ ID NO: 150
  chemically treated genomic DNA (Homo sapiens)

SEQ ID NO: 173 - DNA, 3190 bp, Artificial Sequence; identical to SEQ ID NO: 151
  chemically treated genomic DNA (Homo sapiens)

SEQ ID NO: 174 - DNA, 2478 bp, Artificial Sequence
  chemically treated genomic DNA (Homo sapiens)
ttatgagatttaatttggttgttttttttgttgagtgagttattaaaggttttttgtggggtggaggggtgtgagggagtagattatagattttatgttagtattaattttatatttatttgttgttgggtttttttttgagtttaaaatgagttagaatttagggttttagttttggattatgtaatttgttgtttttttttaagttatgtttgatttggtttaaaagtaattttttttttatttgtatttttaattttaaggaagtgggagagttagagtaagttaagtaaattgtggttttagtaatttgttttttgatttttaaagtttaagggaaggtatgttgagagagtttgttaattttgttttgatataagaaaaatgataaaattagttattgatatttttttgattgtatttattttagatttgggaaagaatatttggtttgttataaatataataggagttatatattttttatttttattttttttttttaaagtaagatgattttgtaaatatttttatgaaggatttgtttataaaaaaataaaaattagttttagttgttggtgtattattaagttgttgattaggtatgaaataagtgtaataggtaatagttaatttaatagtttttttttgatttttatatattgagtaaaagttatataggttaaatggaagtttagtgattagttttagatttgaaataaaatttaaattttgtttgtgagaagttttatttgagttaagtttattttttgttgggatatattgttatttgtaatgattttagtttttagtattattttttatttaaatttttttttataaaattgatttaggtaattgatttaaaggtaagttagtttttatagaaagatagatatttaaaaaaatgatttagataaataaattatatttttatagttaggaatttagagttgaattaatttaattagatgtaaaattaatgagaattttgagatttttgatgttttattttagaatttttatttaggtgtggttgggagttatagtttttgaatatttttttggaattttttttttatttgatttttaagtttgttatggggtttttttttaatggtattgatttgtaattatttaatgagtagtgggatagttttgggtaggatgtattttgggtgggtgatgtgattttgtagttttttttttgattttatattttatataatgatttttgtttatagaagttaagggggaaagatgatgtttttaaagtttgaatttttttattttggagttagaattagtgttgttgttgttttttgtagtttagttggtaatgtgtgttgagttttggggtgtagtttggagatgtgtttgtttgttttgggaaggggtatgggatgtatggttttttggttttagttgtatagtttagtttggggtttttatttatttttgtttagagttatatttggttgttttttttgattatttgatataaagagatttgttggtggaaagaattgattttaaaatttaagtttattgttgtttaataaggtgtgtatgtttttttttgtttggttttatatgttttaaatttttagtaatagaaatgaggaagtagtagttttttttggttgttggtggaggtagtgggtgtaatttgtgaagttttgtgttatgatgaatttggttatttgggtgtgttggagagggttggttgtttttttttttttttttttattattattttttttttttttgtttttttttttaatttaatttttttttttggtatttgttggttgttatttagaattttagtattttttttattatatttttgggggtaatgtattttgaaaaggttttaattattttatggatgaatttggttattttgtataaagtgtgagtgtttgttaaataattttttatagtatgtggtaaaaaagtagtgttttttaaaagatataaaaggttagtaatgttatataagtgttttttattagttttttaaggatagaaatgtgggtagtttatttagtggagatttaatttttaaatatttattgaaaaggagtgaagggtagaaaaatagaaattaaatttttagttggttgtttttttttttatatgtattagaaagtatttttaatatataatatatatttgaaaagaatataatgaatatttatgtgtttattatgtagtataaaaaaattaaaattatttatatagtggaaattatttgttaattttttttttgttgaaatatatttttttttttttttttttggaaagaaaattgttttaaatttgattttttatgagtaatttttatattagtttttaaaaatgtgaaagggaatatgttaatttaaagtttattagaaagttatgtaatgaatatttttttgttgtgtttgattttggtttttaaatagaagtttttttaaataaaattttaaa

SEQ ID NO: 175 - DNA, 2478 bp, Artificial Sequence
  chemically treated genomic DNA (Homo sapiens)
tttaaagttttatttaaagaaatttttgtttggaaattaaggttaagtatagtagagggatgtttattgtatggttttttggtaaattttaagttagtatgtttttttttatatttttagaaattgatataaaaattgtttatgggaaattaaatttggggtagttttttttttagggggaaggaaagagggatgtattttagtgaggaagaggttgatagatagtttttattatgtgagtaattttaatttttttatgttatatggtgggtatgtgggtgtttattatattttttttaaatatatgttgtatattggaaatattttttagtatatatgaaagaaaaggtagttaattgaaagtttggtttttgtttttttgttttttatttttttttaatagatgtttgggagttaggtttttattgaatgaattatttatgtttttgtttttgaagggttggtggggggtgtttatgtaatattgttggttttttatattttttaagaggtgttgtttttttgttatgtgttgtagaaaattatttgataagtatttatgttttgtgtagggtgattaggtttatttgtaaaatggttaagatttttttgaaatatattgtttttaaggatgtggtggggagggtgttgggattttgagtgatagttggtgaatgttagagggaagaattaaattggagagggaggtggagaggagggaggtgatggtgggaggaggaagggaggagtgattaattttttttaatatatttaagtgattagatttattatagtatgaaattttataagttatatttattgtttttgttagtagttggggaaggttgttgtttttttatttttgttattggaagtttgggatatgtgaagttagatggggagaaatgtgtgtgttttgttgagtagtggtgagtttgaattttgaaattgattttttttattggtgaatttttttgtgttgggtggttaggggaggtagttgaatgtggttttgaatgaggataggtgagagttttgagttgagttgtgtagttggggttggggaattgtgtgttttgtgtttttttttagaatgagtaagtgtgtttttaagttgtgttttgaggtttggtgtgtgttgttggttgagttgtaggggatggtggtgatgttggttttggttttagggtaaagagatttgggttttgaaagtgttattttttttttttgatttttgtaagtgaggattattgtatgggatatggggttggggaggagattgtgggattatgttatttatttaggatgtgttttgtttggggttgttttgttgtttgttgggtaattgtaggttagtgttattgaaaaagaattttatgataggtttgggaattaagtgagaaaaaagttttgaaggaatatttagaagttgtggtttttgattgtatttggatgggagttttggagtgggatgttggaagttttggggtttttattaattttatatttgattaaattagtttgattttaggtttttggttgtggaggtgtgatttgtttatttggattatttttttaaatgtttgtttttttgtgaaagttagtttatttttggattgattgtttaagttaattttgtgagaggaagtttgggtggaaggtggtgttgggggttgggattattgtaagtggtagtatgttttagtaaaggataaatttagtttaaatgaggttttttatagataggatttaggttttattttaagtttggagttggttattgggtttttatttggtttgtgtagtttttgtttagtgtgtaggggttagagggaggttattgggttaattgttatttgttgtatttgttttatatttgattaataatttaatagtatattagtagttggagttggtttttgtttttttgtaagtgaattttttatgagaatgtttatagaattattttattttgaggggaagaaatgaaggtgaaaaatgtgtggtttttgttgtatttatagtaagttaaatgtttttttttaggtttggggtgggtataattaggaaaatgttagtagttgattttattattttttttatattgaagtggaattggtagatttttttagtatatttttttttgaattttgggggttgggaggtaggttgttggggttgtagtttgtttagtttgttttgatttttttatttttttgaagttaaagatatagatggagaggaaattatttttaaattaaattagatatggtttagggaagaataataggttgtatgatttagggttagagttttgagttttagtttattttgagtttaagaaaggatttagtagtaggtagatgtgaaattgatgttgatatgaggtttgtgatttatttttttatgtttttttattttataaggaatttttagtaatttatttaataggaaagataattaaattggattttatga

SEQ ID NO: 176 - DNA, 2387 bp, Artificial Sequence
  chemically treated genomic DNA (Homo sapiens)
ttatagtttttgggttttgtttttttttttattgtatttttaaaatgtaaggtgtaatgataatagtaatgttttagttatttttgagattttttaaattttggatttgtttttttttttttttttaaagttttttgaattttttttagtggataaatgaagggattgaagttggataaaattataatttaggagattagggatttattttattttgttttttgtgtttggaattagataatttaggatgttgggtttgagaagtttggataaaaaagttaggaaaaattgagttttgttttgatttttagtgttgtggtgggttggtatttgagttggtaatgtgtgtggtaggttatgtaagaaaagggatggaggagttgttttagtgggagttagaaaggatgtggtgtttttggttgtaatttttattttttttatttagtagggtaggaggtatttaatttggaggagaaaggggtgggggaggtgaaatagagattggagagttatgagggttgggttgttgagagtaggagaatatattgtgttatatatttttatttttttatatatgttgtagatataaattattgatggtttttatgtgttgtgtttgtgagtggaggtgtttaaagagggggtagatgagttattttttgagatggaattgggggttttatgtttgttgtttttagtagtataattaatttttgaatatttaaattgtgtatttttggtgtattattattttatttaaggttatgggttttgtttttttttttttttttttttttttttattttttttttattttttttttttttttattattgggttttttttagtagttgtatgtaggggaggagtatggaatgttttttttatagttaattattatttggttgtttttttattggttgagtttttttgtattgtagtaaatgggttatggattttagtaattagagttatgtgttattggtgatataattaatgagggtgtgagatttgtgtaagtagggggaggtatgtgttgggttgtatgtgtttgggagggggggaaggggtggggtttattgagagaggtggaggtgggtagatagatttggagagatggtgaaggagttggaaattgagttagggttgagttggttgataataggtaaggagatttggaggataaagtgagttgttagggagtatttgggagtggatttgggggttgaatgtagattttggtattgggagggtttgtattatgtggtaggtgtgagtttagagagattggtgtagggattttgattttgaaagattgggagagggtaggaggttagtttttatgggggtggtttttgtaggattattaggtgggtttgtgtgtttagattgattgtttgtgggtggtatggttttaggtggagaggtttgttgtggatttaggttggtgaatagttttggtgaataatgggtggaggggaaggtgttttttaagttggtatttattttgaattgagggaagaaaagaatggaggttgtgttagattgagagttgttttgtggtggttagagagggaattttaagtttttaatgggtgggggtgggggtagaaatgtttttttttattgtgtttgagattggtaatattggggagggggagaataagtattattttatgtagtatattttaattttttagtttattttttaatttttaaattttggttttaaatttttttgttttgttttttagttgtaggttttgatttttgggtattttaggagttgttttatagtttttgtttttggatttatggattttttatttagtgtttttttttattttttttattttttttttttgtttttttttatttttttagtgaatagtgattttggttttttttttgatagtgagagggaggataagggggtttatgggtttaggttagatattgttgggtagaggggaggtttatggtttagtttgggttttatttgttgtaggtattgattgaaggtttttggtaattagtatatattattttatttgaaatagtggggtttggttttttttatggtaggatttggggtgaaaagattaagagatggtgaattggagattagtttaaatatttaaggttgtattatagagggagatttgttgtttgtttagaaggtaagagaaagtaggtgaaaggagatttttttggagtgttttagtatttagttggttgataaggattttgtgaggatagtattgatttttagatttggaggtgaaggaagagttattgttggtgtgggtagttttttgtttttttatagtttttgttttatttttttatagtgtaaagaattttaaggatttatatttttttttata

SEQ ID NO: 177 - DNA, 2387 bp, Artificial Sequence
  chemically treated genomic DNA (Homo sapiens)
tgtgagaggaggtataaatttttggagttttttatattgtaggaaaataggataaaggttgtaagaagataaaaaattgtttatattagtagtggttttttttttatttttaaatttgggagttaatattgtttttatagggtttttattaattagttgggtgttaaggtattttaggagaatttttttttatttgtttttttttattttttgggtaaatagtaggtttttttttgtggtataattttgggtgtttagattggtttttagtttattattttttgatttttttgttttagattttgttataggagaagttgaattttgttgttttggatgagatggtgtatgttggttattggaaatttttgattgatgtttgtagtggataggatttgggttgggttgtgaattttttttttgtttaatagtgtttggtttgggtttatgggtttttttgtttttttttttattattagaggggaagttaaagttattgtttattggggaggtgggaaaagatgaagagagagagtaggaggaataggaagaaatgttagatggagaatttataggtttagaagtaggggttatagaatagtttttggagtatttaaagattggaatttgtaattgaagagtaaagtgagggagtttgaaattagagtttaaggattaggaaatgaattgggagattggggtgtattgtgtgggataatatttgttttttttttttttaatattattggttttaaatataatagaaaaagatatttttatttttatttttgtttattaagagtttgggattttttttttggttgttgtagagtagtttttggtttgatgtggtttttgtttttttttttttttagtttagagtaaatattgatttgaaagatatttttttttttgtttgttgtttgttagggttatttgttagtttgagtttgtagtaagtttttttatttgaggttatgttatttataagtagttaatttgggtatgtgaatttatttggtgattttatgggaattgtttttatagagattggttttttgtttttttttaattttttaagattaggatttttgtgttggtttttttgggtttgtatttgttatgtgatgtaaatttttttaatattaagatttgtatttagtttttaaatttatttttaaatattttttaatagtttgttttgttttttgaatttttttatttgttgttagttggtttagttttggtttggtttttagtttttttgttgtttttttgggtttatttatttatttttgttttttttagtgggttttgtttttttttttttttttagatatgtgtggtttggtatgtgtttttttttgtttatatagattttgtgtttttattggttgtgttgttggtaatatgtgattttagttattgaagtttatagtttatttgttatagtataaaggggtttagttagtagagaggtagttaggtgatgattggttgtaagggaagtattttgtgttttttttttatatgtggttgttggagaggatttggtgatgagaaaaggaggaggatggaaaaagagtggaaaagaagggaggggaggaaaagggtggagtttgtggttttaaataggatggtgatgtgttagagatgtgtggtttgagtgtttagagattggttgtgttattgaaggtggtggatgtgggatttttggttttgttttgggaagtaatttatttgttttttttttgaatatttttgtttatgagtgtagtatgtggaaattgttagtgatttgtgtttgtaatgtgtgtgagagaatggaggtgtgtgatatggtatatttttttgtttttggtggtttagtttttgtgattttttggtttttgttttattttttttattttttttttttttaagttgggtgttttttgttttgttgggtgaggagggtggggattgtaattgagaatattgtgttttttttggtttttgttggggtggtttttttatttttttttttatataatttattatgtatgttattagtttagatgttagtttgttatgatgttagaggttaaaatgaaatttagttttttttgatttttttatttaggttttttgggtttggtgttttaaattatttgattttaagtatggggaatagaatggggtaggtttttgattttttaggttatggttttgtttagttttagtttttttatttgtttgttggagaagatttgaaagattttgaaggaggggagggaggtaagtttagagtttagagagttttagaagtaattgggatgttattattgttgttgtgttttgtattttgagagtataatggagaggagagtagggtttaaggattgtga

SEQ ID NO: 178 - DNA, 2320 bp, Artificial Sequence
  chemically treated genomic DNA (Homo sapiens)
aattatttagatgtaaagtaaatttaagtaaatatttaaaatgtaaaatttatattatttttgtttttttgtaatgtaatggagttataaattataaaagtttaaataaagaagttaattgtttagaaatataaaagtaagggagtaaagaggatatataatgatgtattgtttgtattaaaataaatataagtatattatgtagtaaatgagatagagtttaaattgttattgggtattaatttgtagttttaattgtgaatgttattttttaaagttagataaaagaaatatgtggggtgtaaattttaggagtttaggaaaatatttttggtttaaagaggtatgttaagtggtttttatatagattttgttgatttattattagaatttttgtaattaatagagattatagtttatattgttgttatttttgtaggtggataggtaagttaggttggggaaatggggtgaaatttattatttaatgttgttttaggttttttgtttttaaagggattttgtgtttgaggtttatttattatggggtttggggttttggagggttattatattaattttttttgttatttttttttatttttagtgtttatggtgatttaggaattttgtgtttagttgtttggggtaattttgtttgtttttaatttatttgttaaagttttgagttttaggattttagaatgtgattgtgtttggagatagggatttgataggggagattaatatgaagtgaggttatatgggtgattttaattttatttgatatgtgtttttataggaagaggagatgaagatatagatatgtatagaggggtagttttgtgaggatatgtggagaagatggtgtgtgtgagttagggagatagaaattaattttgataatttttgattttagatttttagtttttagagttgggggaaagtatgtttttgttgttgaagttgttagtttgtggtgttgggttatgtgttagtatttatgtgttagttgagatagtaatagtgagatattttggataggtggagggtgtgtggtttttttattgtttatttgaaaatattgtttaaaggtgagtttagtttatgaagtttgtatgaaatgatgtgtttaatagtaggaaggatttgggtggtataaaaagaaaaagagttagggagattaagttaggagaggggagaatgagagtggaaatggtttggttgtgtttttatataaattttattttgaattgtagtttttataatttttatgtgttgtgggagggatttagtgggagataattgaattgtgggggtggtttgtttatagtgtttttatggtagtgagtaagttttgagatttgatggttttaaaagtggaaattttttttgtttgatttttattttgttttgtttgttgttatgtaagatgtgttttttgttttttattaggattgtgaggtttttttagttatgtggaattgtttgttttttaaatttttttttttttataaattatttagttttgggtatgttattattagtagtgtgaaaatggattaatataagattttttaaaggatgttgagtttagtatttttttaaagtttgaggaattggagtgatatgagggtttggtttaatttttttgattgttgagttttgattttattttttggggggtagggagatgtggagtgaggaggtatttattgaatatttttggataagtggaggttgtagtgggtatttgggtagatagtagtttgtgatgtgtaggttgtttaggaggttggagttgggtgtagggttttatagtagttagtttttgtagttaataagtatttgtgaaattttgatggtgtgtaatgtagtaatttatttgggttgtgttgggaggttggttggttggagttgttgggtttggggtgtttttttgttgttttttttttgtggattgggggttggtggggatgagttgttttttttagtaatggtgaaggtgttggggagagtagaaaattttttatttttgtaggtttaggttttgggtttgtatatttttttttttgtttatgtgttttggggtgagtttagtttagggttaggatatgtatttttttttttgagggaggaatggttttttggtagagggtttggatgtagggtagagtgaaaaattgtggttaattatgttatttgttatattggtttgagaagttggattgtattttagggtagtaggggttattagtaagtgatagggagttgggttgtagggaggtgggaggttgagaaatttgttggaggttattgt

SEQ ID NO: 179 - DNA, 2320 bp, Artificial Sequence
  chemically treated genomic DNA (Homo sapiens)
atagtggtttttgataggttttttggttttttatttttttgtagtttagttttttgttatttgttgatggtttttgttgttttgggatgtagtttaattttttaggttggtgtggtagatggtataattggttataattttttattttgttttgtatttaggttttttgttaggagattgttttttttttagaaggaggaatgtgtgttttggttttgaattgggtttattttggggtatgtgggtggaggagagagtgtgtaggtttggggtttgggtttatagaggtggagggttttttattttttttagtatttttgttattgttgagggaagtagtttgtttttattagtttttagtttatgaaggagaagtaataaggggatattttagatttaatggttttagttagttagttttttggtgtagtttagataaattattgtattgtgtgttgttgagattttataggtgtttgttggttgtaggggttgattgttatggggttttgtatttagttttagttttttgggtagtttgtatgttatagattgttgtttgtttaagtgtttattgtggtttttatttgtttagaaatgtttagtgaatatttttttattttatatttttttgttttttgggaggtggggttagaatttaatggttaggaagattgaattaagtttttatgttgttttagttttttaggttttggggaggtgttgggtttggtgttttttgaagagttttgtattagtttgtttttatattgttgataatgatatatttaagattgggtaatttatgaagagaaagaggtttaagggatagatagttttatgtggttggggaggttttataattttggtgaaaggtgaaaggtatgttttatgtggtagtagataaaatagaatgagagttaagtgagaggagtttttgtttttaaaattattagattttaggatttatttattattatgagaatgttatgggtaaattgtttttatgatttaattattttttattgggttttttttataatatatgggaattatgggagttgtaatttaagatgagatttgtgtggggatatagttaaattatttttatttttattttttttttttttgatttggtttttttgattttttttttttttatgttatttaggttttttttgttgttgaatgtgttattttatgtaggttttgtggattgggtttatttttaggtagtgtttttaggtgggtggtgggaaggttgtatgttttttgtttgtttggagtgttttgttattgttgttttggttggtgtgtgggtattggtgtgtaatttggtattatagattggtagttttaatagtagaaatgtatttttttttagttttggaggttggaagtttgagattaggggttgttagggttggtttttgtttttttggtttgtatgtgttgttttttttatgtgtttttatagggttgtttttttgtgtgtatttgtgtttttattttttttttttataaggatatgtgttagatgggattagggttatttatgtgattttattttgtattaattttttttattgagtttttgtttttaaatatggttatattttgaagttttgggatttagggttttgatagatggattggaggtggatagaattgttttagatggttgagtataaagtttttgggttattgtgaatgttggagatggggagaggtggtaggggggattagtgtgatggttttttaggattttaagttttatggtgggtggattttaggtatggggtttttttaggggtagggggtttaaggtggtattgagtggtgggttttattttatttttttagtttagtttgtttgtttatttgtgggagtggtggtggtgtgagttgtggtttttgttgattgtagggattttggtggtgggttggtggggtttgtgtgagggttatttgatatgtttttttaaattagaagtgtttttttaaatttttggggtttgtgttttatatgttttttttgtttgattttaagaaatggtatttgtggttgaagttatagattgatgtttagtgatagtttgggttttgttttgtttgttatgtagtatgtttatatttattttagtataaatgatatgttattgtatgttttttttgtttttttatttttatatttttaagtagttggtttttttgtttaaatttttatgatttgtagttttattgtattatgagaaagtaagagtggtgtaaattttgtattttaaatatttatttagatttattttgtgtttaaatggtt

SEQ ID NO: 180 - DNA, 2728 bp, Artificial Sequence
  chemically treated genomic DNA (Homo sapiens)
tttttatttataaaattaagttataaaagaaaaaaagaaatagtggaatgagaggtaagagtgtgtaagtaagagtaggtgtgaatggttgtatgtgatggtatttgttatagttgggatattagagagagttagattttaggttagatgtattataggggttttaggatagtttattgttttttttttaggattggttttggtatgtaattttagtagttttaggtagttgttttttggtggaatttttaggagtgggggtatttattagtgttgatttgtggggttttagttgaggatagtttggttgtgggagtttataaagtaatggataataggtaatgttttttttgtttaatagtagtggttagagggatagatttatttttatagagattgttaggtattgttgttatagatatggttttttttttggtatttagttttgtttgttttatataggagtataggaaaggaatttttaatgagtttattttttatgttaggagagaggtaaggtgttgagttttttatttggggagtttagttgtattttttttttagtttttatttttttgatttttttttttttttattatttttaattagtggtttattattttttttttagttagttttggttgtgatgttaagtggttttgttggattttatattttgtttggtttttaaaagggtattgatttgagggtataaatgtagaggttttggggtagttaggtagttgtgagtaatttagtatttagttgtttagggtgttttaggtagtggtggtagtagttagaagttggtgttattattatataagttaggtaaattttgttttagtatatagagtgtatttaattagtaggaaggaaataagttaaaatttttttgatattatatatatatatatatatatatatatatatatatatatatatatgagtttgaggataaggataaatattttgtagaaagaattttttttttattttattgatgtttaagtttttgttttaggattttttattttttagtagtttttaaaatttttgtgtttgattattttttttaatatatgggatagagagaatttggttaattttaaattttgttttttgagtatttgtttataaatagtagggggagtgatggggatgtttttttgttttttttattatttttatttttgttttttatgttatttttaggttgatagtgttggggaaagatattagattattaatttagttttttttgttagttggggaaataatatttggttattaatagtatttaattatttagagagtgagagtgagttgaggtaaatatgttgggttttagatattgttttagtttttgagatttgggtttgtaaagggttgtatatgtttgttggagggttgttgttgtttttgagaaaggatttgaatttgagtttggtgaaggtaaaatgatatagagatttatttttaggttgtgtgtggggttgatgatatagataagttgtttggtagtggagaaaatttgtttagttttgtagtgttgaaattggagatgaatgagatttaatatagttttaaagtattgggtaaagaaaagtattataatttttggggggttgttggtttgggaaggtagtggaggaagttgtgagtttttgggttttggaaggagtgtagtttttgagatattttgttttagtttggtttagtgtgtttttatatttattattaaaataagatggttagaattttgtagtagtgaggtggttaattaaaaggatagaaatgttatttttgaggtgtagagatagttaataataaatgttttttttattgaaattttttgatgaattgagtttggtggagaatgtattattgaatattattatagattagtatattgtatttattttgtgattatagttaattatatttaatgttggggagataggttgataaaattgattgtttaatgtgtttttatttattaattgatttaatttaatatgagagttttttttaatgttttggtaagaatgtaaagtgtttaagttgttaaatagtataatattttgttttaaagtaggtagatggataatgtagattatggtttgatttattagagttgtttgggagaaaataaaatattattagattttgaatttagataaggatttggtagtagtaaaaatgtgtattttttaattttgtgttttgattttttgtaatttggattatagttttttgataaattttattttttattttttattaaagaaaagaatttttgataaatttatttggagttgaggggtggagggaagtatatatatatatattattatatatatatatatatttttttttttttaaaatattgtgattattgaagtttgaaagtattaaaggataaaaatgtatagagtatgttttaaaaaataatgaaatttttgatgtatgaatgtatatatatagaaaaatttatattgagaggaaagaggtttgtaaattagtaaaataattatagatgtagagaatttttgtttgttatttatttgtatattggtgggtagtaaattgttaattaattattagattgttggagatattaaaatagagattaaggatgtatatattatattatttatttgtttttgtaaatgttagtagtatatttttgtgttggtataggtagagggtattttagtttttagat

SEQ ID NO: 181 - DNA, 2728 bp, Artificial Sequence
  chemically treated genomic DNA (Homo sapiens)
gtttgaggattggaatgttttttgtttgtgttagtatagaaatgtgttgttagtatttgtagaaataagtaaatgatgtggtatgtgtatttttaatttttattttaatgtttttagtaatttagtggttaattagtaatttgttgtttattaatatgtaaatgaatgataagtaaaggttttttgtatttgtaattattttgttgatttataagtttttttttttttagtgtaggtttttttgtgtgtgtgtatttatgtattagggattttattattttttgaagtatattttgtgtatttttattttttaatatttttagattttagtaattatagtattttgaaaaaaagaaaatatatatatatgtatagtaatatatatgtatgtgtttttttttattttttaattttaaatgaatttgttagggatttttttttttgataaagagtggagagtaagatttattaaggggttgtaatttaaattgtagaaagttagaatgtaagattgaaagatatatatttttgttgttgttaagtttttatttggatttagagtttagtaatattttatttttttttaagtagttttggtgagttgagttatgatttgtgttatttatttgtttattttggagtggggtgttgtattatttggtggtttaaatgttttatgtttttgttagggtattaagaaaggtttttatgttaaattaagttaattaataaatggagatatattaagtaattaattttgttagtttatttttttagtattaggtatggttggttgtaattataagataaatgtaatgtgttgatttatggtaatgtttaataatatattttttgttaggtttaatttattagggagttttggtagggaaggtatttgttattggttgtttttgtattttaaggataatatttttgtttttttgattggttgttttattgttgtaagattttaattgttttattttgatgatgaatatgaaggtgtgttaagttgggttggagtggagtgttttagaggttgtgttttttttagggtttaaggatttatagttttttttgttgtttttttggattaataattttttaaaagttgtgatgtttttttttatttagtgttttggggttgtattagattttatttatttttggttttagtattataaggttaaatgggttttttttgttgttgggtaatttgtttgtgttgttaattttatatataatttaaaggtgagtttttgtgttattttatttttattgggtttaggtttaagtttttttttggaggtggtagtgattttttggtgaatgtgtgtagttttttgtaaatttgggttttgggggttgggatggtgtttggaatttggtgtgtttgttttggtttatttttgttttttaggtgattgggtgttgttagtgattgagtgttgtttttttagttggtaggaaaagttggattgatggtttgatgtttttttttgatgttgttaatttgagagtggtgtggggggtagaagtgagggtggtggagggaataggggggtgtttttattattttttttattatttgtgggtaagtgtttaggagataggatttgaagttagttaaattttttttgttttatgtgttgggagaggtggttaaatatgaggattttagaagttattggggggtgaggaattttgaaatagggatttggatgttggtggggtggggggagggttttttttgtaaagtgtttgtttttgtttttagatttgtgtgtgtgtgtgtgtgtgtgtgtgtgtgtgtgtgtgtgtgtgtggtgttgggaggattttggtttattttttttttgttggttagatgtgttttgtgtattggagtaggatttgtttggtttgtgtaataatgatattagtttttagttgttgttgttgttgtttggagtattttaggtagttgggtgttgggttgtttgtggttgtttagttgttttggggtttttgtatttgtatttttaggttagtgtttttttagagattagataaaatatggggtttggtagagttgtttaatattatagttaagattgattgggaaaggaatgatgggttattggttaggggtagtagggaggaggggaagttagggaggtgggggttggggagagggtgtagttgaattttttggatgggaaatttagtattttgttttttttttaatataaaagatggatttattggaagttttttttttgtatttttgtgtaaggtaggtaggattgagtgttgggggaggggttgtgtttgtagtgatagtgtttgatagtttttgtgaggatagatttgtttttttgattattgttgttgggtaggaagagtattgtttgttgtttattattttataaatttttatggttggattgtttttagttggagttttgtaggttagtgttgatgggtgtttttatttttagaagttttgttgaaagatagttgtttggagttgttggggttatatgttaaggttagttttgggggaggggtgatggattattttgggatttttatggtgtatttgatttaggatttgattttttttgatattttagttgtgatgaatgttattgtatgtaattgtttatatttgtttttgtttgtgtgtttttgttttttattttattattttttttttttttttatagtttagttttataaatgagaa

SEQ ID NO: 182 - DNA, 2673 bp, Artificial Sequence
  chemically treated genomic DNA (Homo sapiens)
gttaggtgatttttttggagtattgattggggttgtaggtgttttgttttgttgtttttggagtttgtttttggggagtgggggtggttgtaattattagttgtgaggagaggattgtattttttttttttggttggtatttgaatagagttagtttttatttttgtagtggtgaagtgtttataaagtttgtgttgtgttgttgatttagagttgggtaggaagtggggaagagggggtggaggagataaaggggttggtgttttgtttagttaagttttggtttttggtttgatttttttattttttgtatatttttggtgaggttaggaggtttatttggtgttgtgtatttttgtttgtagtttttgttttatgtggtataggtgtgggggtggggtgttatggaggtttaggtgtgggtggtggggttggggtagtatgggtttttggattgttgttttttggtgttggtaatttttttatgtgttatttaggaagtaaataatattatgaggagtgattttttttttttttttttttttttgagatggagtttttttttgttgtttaggttggagtgtagtggtgtgattttggtttattgtaatttttgttttttggatttaagttatttttttgttttagttttttgagtagttaggattataggtgtatgttgttatgtttggttaattttgtgtatttttagtagatatggggttttattatgttggttaggttggttttgaatttttgatttgaggtgatttatttgttttggttttttaaagtgttgggattataggtgagagttattgtgtttggttgattttttgatttttattatatgttaggtattgtgatagattttttttgtgtattattttattttttttttagttttatagaagaggaaattgagatatattgaggattaaggttaagtgtttgaagtattatagttggttagtgttaggatttaagtttagaatttgtgttttgttaggtatttgtaaatggggatgaatatggtgtagttagaggggttgataggttagggagaaaattattggtagttgtgggtattttatgttttgggagtgaggtggtaagggataagttttttgttttttagatttgttttgtaaatatttgtgggttgagggtgtgaaggtagtaggatgtagtgatagatttggattaggtggtttaggttttatttttaagtgggttattgataggtggggtggtttttagtataaaattattaggttggatgttttagggttttttaatattatttgtttagaagaattatttggggagttttttaatgagaaagatttttaagttttttttttagagagtgaagttattgggattgggttgggtttagttaggtgttattaataataagataagtttggaaaattttgtgagtgtagatgattttttggtatgttttttataagaattgatttttatattaaaataggttttttttaatttagtgaaattgggtgtgtttttttggtttataattaagttattgaaggttttagaatattttatttttaaaaggttatgtgaggttggtgtggtagtttatgtttgtaattttagtattttgtgaggttgaggttgtggattgtttgagtttaggtgtttgagattagtttggttaatatggtgaaatttggtttttattaaaaatataaaaattagtggggtgtggtggtgtttgtttgtaattttagttattttggaggttgaggtgggaggattgtttgagtttgggaggtggaggttgtagtgaattgagattgtgttattgtattttagtttgtgaaatggagtaagattttgtatttaaaaaaaaaaaaaaaaagttatgtgagttggggttattggaggtgttttttaattgattgggttttggaaaattaaggggtgtatgttgttttgttttgttttgttttgtgattataagttttattgtgttttgtgtttgtgtatattatgttagaataagatggttgatgtggtggttatagttggggttggtggttttggaatggtaagggtaggaagtgtgggtttggagttgagagagtttgggtattttgtaattttttttttgattgagtaataagataatgtttagaaatttagttttattatgagttttgattggtggagggtgtttttaggttgtaggtgttttttttttgggatttggttgtggtttttggagttggtggatttgtgttttgattggtttgtttgttgttgggggttgggagtttggaatatttttgattggtttgaagatgttgtttttgtttttttattggttggttaaagttgaaaggtatttttgttttaaaatatttagtttttttatttttttgtgtttttattttttgtttttttttttttgtggttattttttgttattgtttttatttttttttttaatgaaatggtgtgaagatgggaggtataagagagggattttgttttttttgtgggatatgttttaattttattatgtgtgtttttttagttatgtattttaataatttgttaaagtagaaagtaaaagatttgttattttattttattgggattgtatgttttaggtaagtggagaagtggtttttgtattta

SEQ ID NO: 183 - DNA, 2673 bp, Artificial Sequence
  chemically treated genomic DNA (Homo sapiens)
taaatatagagattatttttttgtttatttaaaatgtatagttttaatgagataaaatagtaggttttttattttttattttagtagattattagaatatatagttgaagaaatatgtatgatgggattaagatgtgttttgtagaaaaaataggattttttttttgtgttttttatttttatattattttattgaaagggaaaatgaaaatagtaataagaggtgattgtgaggagaggagggtaaaagataaaagtataaaaaagtaagaaagttaaatattttgaaatgggaatgttttttaattttggttggttaataagaaggtgaaaatggtatttttagattaattgggggtgttttgggtttttaatttttaatagtgaatgagttaattaagatataggtttgttaattttggaggttgtagttaagttttaaggagggggtgtttatggtttgaaaatattttttgttagttggagtttatgatggggttgaatttttgggtattattttgttgtttagttgaggggaaagttgtaggatatttaaatttttttggttttgagtttgtgttttttgtttttattgttttggagttattggttttagttgtggttgttgtgttggttattttgttttggtgtagtgtgtgtgagtgtggggtgtgatgggatttgtagttgtggggtggggtggggtggggtggtgtgtgttttttggttttttgaagtttagttggttgggggatgtttttggtgattttggtttatgtgattttttttttttttttttggatatagagttttgttttgttttataggttagagtgtaatggtgtgattttggtttattgtaatttttattttttaggtttaagtgatttttttgttttagtttttggagtagttgggattataggtgggtattattatgttttgttagtttttgtatttttagtagagattgagttttgttatgttggttaggttggttttgaatatttaagtttaagtagtttgtggttttggttttataaggtgttgggattataggtgtgagttattgtgttagttttatgtgattttttgagagtgaagtgttttggggtttttagtggtttggttgtgggttaggaaaatgtgtttggttttattgagttaaaagaaatttattttaatatgaaaattggtttttataaagagtatattaggagattatttatatttgtagggttttttaaatttgttttattattagtaatatttggttgggtttagtttaattttagtgattttattttttggaagaggggtttgggaattttttttattaaggagttttttagatgatttttttgagtgagtaatgttgggaaattttggagtatttagtttggtgattttgtgttgagggttgttttgtttgttaatggtttatttggaagtagagtttggattatttagtttaagtttattgttgtattttgttgtttttgtgtttttgatttgtaagtatttgtgaggtaagtttagggggtgggagatttgttttttgttgttttatttttagggtgtggggtgtttgtggttattagtggttttttttttagtttgttagtttttttagttgtgttgtgtttgtttttatttgtaggtgtttggtaggatgtagattttgggtttggattttaatattagttagttatggtattttgggtatttgattttaatttttagtgtgttttagtttttttttttgtaaagttgggggaaagatgagatgatatatagaaagagtttgttatagtgtttgatgtgtagtaagagttaagaaattggttgggtgtggtggtttttgtttgtaattttagtattttgagaggttgaggtgggtggattattttaggttaggagtttgagattagtttgattaatatggtgaaattttgtgtttattaaaaatatataaaattagttgggtgtggtggtgtgtgtttgtagttttagttatttgggaggttgaggtaggagaatagtttgaatttgggaggtggaggttgtagtgagttgagattgtgttattgtattttagtttgggtgatagagggagattttattttaaaaaaaagaaaaagaaaaagaagttgttttttatgatgttgtttattttttggatagtatgtggaggagttgttaatgttgggaggtagtggtttgggaatttgtgttgttttggttttgttgtttatatttgagtttttgtggtgttttgtttttgtatttatgttgtgtggggtgggggttgtgggtgggggtgtgtggtgttggatgagttttttggttttgttgagggtgtatagggggtgggagagttaggttggggattgaaatttggttgagtagagtattagtttttttgttttttttgtttttttttttttattttttgtttagttttggattggtggtgtggtgtggattttgtaaatattttgttattgtaggggtggagattggttttgtttggatgttggttgggggggagaggtgtaattttttttttgtggttggtggttgtgattatttttattttttaaaggtaggttttggaggtggtgggatagagtgtttgtgattttagttggtgttttggggaggttatttgat

SEQ ID NO: 184 - DNA, 2508 bp, Artificial Sequence
  chemically treated genomic DNA (Homo sapiens)
ggagaggttggaaaaatgagttttgaaattgtagttttataaaagtaaaattgagaaaagatataatagtgatggagaaagttagatgggtattaaaaaataaaataggagttttttttaggttgtgtttatatgggtttgttgtgtttgtttgttattattgatattttattttttgttttttgtatgggaggggtaagaatgtgatttgtttgtagtttttaggtaggtgatgaggatagttagttttgtggttttttgttagttggtggtgggggttggttaggtgtttggattttttgagggttttattgttgtgtgttttggggattgggattgttatttgtgttttatttgtgtgtttgggttttagggttttgtttttgggtggtggtgtgggtttggtttttgttgtagttatgattgtttttattgtttttgttgtttttgtttgggaagtggtgagttggtttggtttgttttgtttgttttttggtttgtatttatgttttatattgtgtagtttggtttgttttttttttagtttgtttttgaggtttttggttttgttttttagtgatgttagtgttttgtttttgtgtagttttttggttgttatttttgtgtggggatgtagtggagagggaagtggagagtgggaatgtgttgagttgtggtgggtgttgttttagtagttgtttttggttttgagtattgttttgtggttttgttttttgtgatgatgttagtagttgtgggtttggttgttgtgtttgagttttaagattttgtatttgggtgtgtgttttggtgtagtgtttggtgtgatgtttgtgttagttttttttttttgggagaggtagggagtgtgatgtttattttattagtgggtaaattgtggtttagggatgttgggtgatttgtttgaggatgtatatagagggaagggttaagttgggattttaatttgggattttttgtttttggggagattggtgaggtttttgtgatatggtttttttatttttaagttttttgtgtagatttttgttttgtgggatttgattgtgggttgtgggtttgtggtttttgtaggtagagagaggatgggagaggagatggttatgaggtttggttgtaggtagttatggtgtttttttaataaggaattggaaattttttttgtttgttgatttaaatatataaaaataaaattagttgttgggtttttagatggagtttttgtggtattaggaggtttatttttatttttttttttttttatgtaggaattaggtttttggtttgggggtggtaaaaggagatggtggtgggttaagtgggtgtgtaggtttagatttggggtttttgagtttatgtttaggtattttggattttttatttttgaggttattttttgttttttagaatgaagggttggtatagttttgttaggatgtatgtttagtgatttttgttagattgaagtattttttttttgtaagtgtttgaagtgtgagaggtattgttttaagtgttttaatttgtatttgtttaatttttataggagttaatttgaatgggtatatttatttttattttatagaagaggaaattggggtatagaaagattgagtaattgtttagggggtatgttttaagaaagagggagagataggatttggatttagataggttggttttttagtgttttggattttggtgtggatgatttaatttaagttttttttttttttttttttatgtgattttgtatgtgtttgtgtagagaatgagaaggtagattaaagttatagatgttgtgagaatattgttaagtagaattttgggtgttgtttttatttttttgtatttgtttttttttagagaagttagtttttatttgttgttttgggttttttttatttgagaaaagttgaaggtatttgatgttaatttgtatatagttgttttgtaggttagagtttgggattttttgtttttttatttggaaaagtttttttataggatttgttttataggattgttatgagaattaagtaagatggtgtgggttgggtgtggtggtttatatttgtaattttaatattttgggaggttaaggtgggtgtattatttgaggttaggagtttgaaattagtttggttaatatgatgaaattttttttttattaaaaatataaaaattagttgggtgtggtggtatgtgtttgtaattttagttatttaggaggttgaggtatgagaattgtttgaattttggaattagaggttgtagtgagttgagattgtgttattgtattttagtttgggtaatagagtaagatttaaaaaaaataaaaataaaaataaaaataaaataaaaaaaggtaagatagtgtgggtgaagattttagtagatttttttgtatatagtagatgtttatttattgttagtttttttttttgtttttatttgtataataataggtttatttgttgttgtttt

SEQ ID NO: 185 - DNA, 2508 bp, Artificial Sequence
  chemically treated genomic DNA (Homo sapiens)
ggaatagtgataagtaaatttattattatatggatgggaatggaaaagagaattagtagtgaataagtatttgttatgtatggagaagtttgttaaagtttttatttatattattttatttttttttgttttgtttttgtttttgtttttgttttttttgagttttgttttgttgtttaggttggagtgtagtggtatgattttggtttattgtaatttttgattttagggtttaagtgatttttgtgttttagttttttgagtagttgaggttataggtatgtattattatgtttgattaatttttgtatttttagtagagagagggttttattatgttggttaggttggttttgaatttttgattttaggtgatatatttattttggttttttgaagtgttgggattataggtgtgaattattgtatttggtttatattattttatttaatttttataataattttatgaagtagattttatgaagaagtttttttagataaggaaatggaggattttagattttaatttgtaaaataattatgtatagattaatattgagtatttttaattttttttagatagagaaggtttgggatagtaagtggaggttggtttttttgggagggagtaggtatagagaggtggggatagtatttaagattttgtttggtgatgtttttgtagtatttgtaattttgatttgtttttttattttttgtataaatgtatgtaagattatataggagggaaaaaggagaaggtttgagttggattatttatattaaagtttagagtattagggagttagtttgtttgggtttaaattttgttttttttttttttttggagtatgttttttgagtaattatttagtttttttgtgttttagtttttttttttgtaaagtgggaataagtgtgtttatttaagttgatttttgtgaggattaaataagtgtaaattaaagtatttagaatagtgttttttatattttaggtgtttgtggagaggggatgttttagtttgatagaagttgttaaatgtgtattttggtagaattgtgttagttttttattttaaagggtaggaggtggttttagaagtgagaggtttgagatgtttgggtgtgggtttagaagttttaggtttgagtttgtgtgtttatttgatttattgttatttttttttgttgtttttaggttagggatttgatttttgtgtgaagaaaagagaaaataagggtgggttttttaatgttgtagagattttgtttgagaatttagtaattagttttatttttgtatatttagattaataaatgaagagggtttttggttttttgttgggggagtattgtagttatttgtggttaagttttgtagttgtttttttttttgttttttttttgtttgtaggagttatgggtttgtagtttgtaattaagttttatagagtggagatttgtatgagaggtttggggatgggagggttatgttgtgggggttttattggtttttttagaagtggggagttttgagttggaattttggtttggtttttttttttgtgtgtgtttttgggtaaattatttagtatttttaagttatagtttgtttgttggtaaaatgggtgttatattttttgttttttttggaggagagaggttgatgtggatattgtattaggtattgtgttagagtgtgtgtttaggtgtggggttttggggtttaggtgtagtagttgggtttgtagttgttggtgttattgtggagggtggggttgtggggtggtgtttggggttggggatggttgttggagtggtgtttgttgtggtttagtgtatttttgttttttgtttttttttttgttgtgtttttgtgtgaagatggtaattgaggggttgtatgagaatgagatgttggtgttgttgaagagtgaggttgagagttttaagggtaagttggaggaggagtgagttaagttgtatgatgtggagtgtgagtgtgggttgggaggtgggtggggtaagttggattggtttgttattttttgggtggggatggtgggggtggtgggggtggttgtggttgtgatgggagttaggtttgtgttattgtttgggagtagggttttggggtttgggtgtgtaggtgaggtgtgggtagtggttttgatttttgggatgtgtggtggtggggtttttggagggtttgggtatttggttgatttttgttgttagttagtggaggattgtgggattagttatttttattatttgtttggaagttgtgaatggattgtgtttttgttttttttatgtggagggtagggggtggggtgttggtggtgatgagtgagtgtggtgagtttgtgtaggtgtggtttaggagagatttttgttttgttttttaatgtttgtttggttttttttattattgttgtatttttttttagttttgtttttatgagattgtaattttaaagtttatttttttaattttttt

SEQ ID NO: 186 - DNA, 2535 bp, Artificial Sequence
  chemically treated genomic DNA (Homo sapiens)
ataatggttttttggaattttttggaataaataagataaattaatatattagagttggtagtgggggtatattgtgtttttttagaaaaggattaaggggagtggttttagtaatggaatatgagggatttttttatatggatataaagtattaagggataggttggttttgttttttgtttttttttagttgtttaattaggatttatttagtttatagtgttttattttattgggtttttttggagttagttggagatgataaaaattatataggtattggagttagatagttttatatgttatttttatttgagaaatttgggtgagttatatttttttaggttttagtttttgtatttgtagaaggaagagaagataatttatttttaaagtgttgtgataatttagtgagatgatgtttgttaagtttattatatagggtaagttggtttttttttgttttttgtatttgtttttattgagggtgaaggtagtagagaagatattattagtagttgtttattattgtttggttttggagagggagggattatgtatttttatttaattatattaggttgttattgtttgtatgtattttgtgtttaattggggttttgaggtagtgttttgttttttttggatttttttagatattttaggttggaatggtgaggggtaggtgggagtagttaggtttttttttgggtaagttgtggtgagttatttgtttattttgtagtgggaggtggttgggtttgggggttttattgttagggtttgatttagagggtagtttggagttgttgggttgtattattatgaagatttgtttgtgtagaagtttgttgggttgtttggagtaggtttttttgtggttttttgatgggtgtgggtagaggtgggtgtggaaggtggtttggaagttgtggtggaagtttttgttgaagtagttgtagatgatggggttggtgttgttgttgaagaaggttagttagtgtgtgaaggggaaggtgtagatggtgattaggtgtagttgtggtgtgttgagttgtttgtagttgatgagtagtagtagtgtttagagtggtagttaggatagtgtgaagaatagtgttattatgattagtatgtgtattatgtgtgttttgtgttgtgatgtttgtgggtttgtagtttttttgtttttgggggttgggtttggggtttggtagagtttgtgtgtgatgtgggtgtatatgattatgatgagtgttagtggtgttaggtagatgtgtgagaagagtatagtggtgtagattttgtgtatgttttttttgggttaggttttttagtaggagtagagtgggtaggagtggttgtgggtgtttattatgaagtggtgttttttatgggtgatggttagtgtgatggttgagggatatatgatgagtagtgttagggtttagatgatggtgatggtgatgagtgttttttgtagggttagttttttgtggaaagggtgtatgatgtagtggaatttgttgtggggagagagataggtgggatttgggtgggttttagggtttttgtgaggggatggtgggtgggatgtgggtatttgatttttattattgtatttagggtggtgttgaagaatagtttagatttgaattggttgagtagttaaagaataaaggtagttataggatttatgagaagggaggaggaaattgtagattgtgtgggaataatgaattttgtgtgtatttttgtattttttttttttttttttttttttttttgagatagggtttttttttgttgtttagtttggagtgtagtggtgtgattatggttttttgtagtttttattttttgggtttaagtgattttttttttttattttagttttttgagtagttggaattataggaatgtgttgttattttgttggttaattttttttaatttttggagagatgaggttttattgtgttgtttaggttagttttaaagttttgggtttaagttattttttggttttggttttttgaatttttgggattatagatatgagtttttttgtggggttatttgtgtatttttgggggttaattgattagttggtagttagtagagtgattagagtgtgtagtttgtttttgataaggatgattaggtgtgttaaataatatagtttttgtttatggattttttagaaaattttaggaggttagatgtagagtttatatgttaggttgtttttatgttattttggttatagtattagtatttttataatgtaaggataagtttgtattatttatttttttatgaggataatttagtatttgttattatattttttattattttttaaaggtgaggtttttaagatagttattatattgttgatttatagataaggaaattgggatttgagtgttaagtagttggtttaagtttatatagtaagttgtaaggattagttttgaatttagatttgttttgttttatatgttatataaattagtagttgtaaatttttta

SEQ ID NO: 187 - DNA, 2535 bp, Artificial Sequence
  chemically treated genomic DNA (Homo sapiens)
tggagggtttatagttattggtttatatggtatatgaagtaagataaatttgggtttaagattggtttttgtaatttgttatgtgaatttgagttaattgtttaatatttgagttttagtttttttgtttgtaaattaatagtgtagtaattattttaaaggttttatttttaaaaaataataaagggtgtaataatagatgttgagttgtttttatgaggaaataaatggtgtagatttgtttttgtattgtagagatattgatattatggttaagatgatatagggatagtttgatatgtaggttttatatttgattttttgaggttttttggagaatttataaatagaaattgtgttatttgatgtatttaattgtttttgttgaggatagattgtgtattttgattgttttgttagttgttagttaattagttgatttttaaaagtatataaatggttttgtaaggaggtttatatttataattttagaaatttgggaggttgaggttggaggatagtttgagtttaagattttgagattagtttgggtaatatagtgagattttatttttttaaaaattgaaagaaattagttggtgaggtggtagtgtatttttgtggttttagttatttaggaggttgaggtgggaggagaggattatttgagtttgggaggtggagattgtagggagttgtaattgtgttattgtattttagattgggtgatagaaggaggttttgttttaggaaaaaaaaaaaaaaaaggagaaaagtgtaaaagtgtatataggatttattgtttttatatgatttgtggtttttttttttttttttataaattttgtagttgtttttgttttttgattatttagttaatttaggtttgagttgttttttgatgttgttttagatgtgatgatgaaggttaggtgtttgtattttatttattgtttttttgtaggggttttaggatttatttagattttgtttgtttttttttttgtggtaggttttgttgtattgtgtattttttttgtgagaagttgattttgtggaaggtgtttgttattattgttgttatttgggttttggtgttgtttattatgtgttttttggttgttatgttgattgttatttgtgaggagtattattttatggtggatgtttgtaattgtttttatttgttttatttttgttgggaggtttggtttgagaagggtatgtgtagggtttatattattgtgttttttttgtatatttatttggtgttgttggtgtttattgtggttatgtatgtttgtattgtgtgtaagttttgttaggttttgggtttggtttttgggggtgaggaggttgtggatttgtgagtattgtggtgtagagtgtgtgtggtgtatatgttggttatggtggtgttgttttttatgttgttttggttgttgttttgggtgttgttgttgtttattgattatgggtagtttagtgtgttgtagttgtatttggttattgtttatgtttttttttttgtgtattggttggttttttttaatagtagtgttaattttattatttatggttattttaatgagaatttttgttgtggtttttaggttgttttttgtgtttgtttttgtttgtgtttgttggggagttataaggaggtttattttgagtggtttggtgggtttttgtataggtgggtttttgtggtggtgtggtttagtgattttgggttgttttttgagttgggttttagtagtggggtttttaggtttggttgttttttgttgtggaatgggtgggtggtttattatggtttgtttagggaagggtttggttgtttttatttgttttttattattttagtttgggatatttgagggggtttagggagggtgggatgttgttttagggttttgattggatatgagatatatgtaggtgatagtggtttggtgtggttaggtgaggatgtgtggtttttttttttttagagttaggtagtggtgggtagttgttggtgatgttttttttgttgtttttatttttagtagaggtaaatgtgggggatgggaaggaattaatttgttttgtgtggtgggtttgataaatattattttattgaattgttataatgttttggagataggttgtttttttttttttttatagatgtaaaaattgaggtttggagagatgtgatttatttaagttttttaggtggaaatggtatgtgaagttatttgattttaatatttgtgtggtttttattatttttagttggttttaagagggtttggtaaggtagaatattgtgaattgagtaagttttaattaggtagttaggaagaagtgaaaagtaaagttggtttgttttttgatgttttgtgtttatgtgagggagttttttatgttttgttattgaagttattttttttgatttttttttagaagaatatggtgtgtttttgttgttggttttaatgtgttggtttgttttgtttgttttaagaagttttaagaagttattgt

SEQ ID NO: 188 - DNA, 2346 bp, Artificial Sequence
  chemically treated genomic DNA (Homo sapiens)
gattttattttaaaaaataaaaaataaaataaaattaaaaagttaataaaaataaaaaatggttaggtgtggtggtttatatttgtaattttggtattttgggaggttgaggtgggtagattatttgaggttgggagtttaagattagtttgattaatatggagaaattttatttttattaaaaatataaaattagttgggtatggtggtgtatgtttgtaattttagttatttgggaggttgaggtaggagaattgtttgaatttgggaggtagaggttgtggtgagttgagatggtgttattgtattttagtttgggtaataagagaaaaattttattttaaaaataataattaaattaaaaaataaaaaataaaaaggtagatatttgaagatatatgggatgtatgttggggaggttttgttgttattttttgtttttagttttgtttataatgtgtatttgggggtttagaggtggtatagttttgtttgtttgggtaggagggtttggtgttgatttggtggggtttggtttttttgagtattttttataagggtttgattgtgggtgaggggtgtagggagtagttggttttaagttgggtattgttttgtgagtttgggggtagtttagggttttttagattatattgtttaggttggggttggttttgttggttgagtgggtttttgtttttatgggattttgttttgtagttgatttttaaggttaaggaggttttagtggggtggggtttggttttggatgtggttgatgtgtgttggggttgtttggggtttaggtgttgtgttttgtttttaggagttggaatagtagtttatgatggagaaaagaaattattgtaagattttgaagttttattagaaatttttatagaaggaaaagaggaataaaggtaaggtttttgtgggtataggtttgagattttggttgtaggtagtttggtttttatttattttgttttatttataggttttgatgttaagattatgttgtttaagttgaaagggtagttagaagaaatgaaatttagggtgtaattttttagtttggttaagaagtatttgtaggtaagtgggttttgggttttgttttgttttgtgaggtagtagttttagatgggttttttattgttggatgttgtaaatttgtttgtgtgaagttataaaaggggttttgatttgagggtttaatgttaggaagttttggggtgaggggtagagtgattaagtgtttgtgttttgttttggtaggttatgtatgtggaatgttggggtttggagttttgtatttttttagtgattgtgaatattgtggttgtattttgtgatatgttggattttagttttttggatgagttttttttgtttattttttataatgttaataagtatttgggtggttggtagaaggtttgtattttgtaggttggtatgttgttggggtttatggtttatttgtattttaggtgtgttgggagaaaagtttatttggaaaaggagatgtagtttggggtgttgagaagagggggggaatgtgtttttgttagttagttaggttgggtttgtattttttagtttagagaaatgtttaattggggtttaggttaatgtgtattaggtgttattggtagttttgtagagttttggttagagtggtttttgttgtttgtgggtttgggtattaggttttagggtgtgtttggtggtttttggaggtgttgtggaattgttttatataattaatatatggaatggtttttaaaaataatatgtataggtagtttggtgatgtggtttggattttatttaatttattgagttagaatatttggggtaattagttttagggatgggtgaggttggggtgtttttgtagttttttttatttggtgtgtatattggtttaggagatttttgatttgtaaatgttggtgtgtgtatgtatgtttgtagtagggaggagttgttgggtttatttatttttattagggttatagggttagatttttggttgttttattagtttttttggttttttatttattttggtttgtatgggtttttgggttgtattttgtttttaggtattgggagttgtagtaggttttggatttattggtttgattagtttttagagaggttattttgttagtgattggggttaattttatgttggtttatgggatttttatgatattattttggagttttaagggttttttttgagtagaggttatggggtttagtaaaggatgttaaggaggatagtagggagttagggtttttagtagttagtggggataggtaggtttttagaga

SEQ ID NO: 189 - DNA, 2346 bp, Artificial Sequence
  chemically treated genomic DNA (Homo sapiens)
tttttgggggtttgtttgtttttattggttgttgagagttttggttttttgttgttttttttggtgttttttgttgggttttatggtttttgtttagagaggatttttggggttttaaggtggtgttataagggttttataagttaatatggggttggttttagttattggtagggtggtttttttgggagttggttagattagtgggtttagagtttgttgtagtttttagtgtttgagaatagggtgtagtttaggggtttatgtaggttagagtgggtgaagggttaagggggttggtggggtggttgggggtttggttttgtggttttggtggaggtgagtgggtttggtggtttttttttgttgtaggtgtatgtatgtatattagtgtttatggattaggggttttttgagttagtgtgtatattgagtggagggggttgtagaaatattttagttttatttgtttttggagttaattattttgggtgttttgatttggtgagttggatggagtttaggttatattgttgagttgtttgtgtgtgttatttttggaagttattttgtgtgttaattatgtagggtggttttgtagtatttttggggattattaggtgtattttgagatttggtgtttaggtttataggtggtggaggttattttggttagggttttgtaaagttgttggtggtatttagtgtatattggtttaaattttgattaaatatttttttaaattaaaaagtgtaaatttagtttagttgattggtgagggtatgttttttttttttttttagtattttgggttatgtttttttttttgggtgagttttttttttaatgtatttggagtataggtaggttatgagttttagtggtgtgttggtttgtaggatgtgggttttttgttggttgtttgggtgtttgttgatgttgtagaagatgagtgaggaggatttgtttagggggttgaagtttagtgtgttgtagggtgtggttgtgatgtttatgattattgggagggtgtagggttttaggttttagtgttttgtgtatatgatttgttggagtgggatatgggtgtttggttattttgttttttgttttagggttttttggtattggatttttaaattagggttttttttataattttatatggatagatttatagtatttaatagtgggaggtttgtttgaagttattgttttatggggtagagtggggtttggagtttatttgtttgtagatattttttgattaagttgaggaattgtattttggattttattttttttagttgtttttttagtttggatagtatggttttgatgttggaatttgtgggtggagtagagtgggtgggggttgggttgtttgtagttagggttttggatttgtgtttataggggttttatttttgttttttttttttttttgtaagagtttttggtagaattttagggttttgtggtagttttttttttttattatgagttgttgttttagtttttggggatgaaatatagtgtttaagttttaggtagttttaatatatgttagttatatttagggttaggttttattttattggggtttttttggttttggagattagttgtagggtagggttttatggagatagaggtttatttagttagtgaggttagttttggtttgggtagtgtggtttggggggttttgggttgtttttaggtttatagggtagtgtttagtttggggttgattgttttttgtgttttttatttatagttaggtttttgtgggggatgtttaggggaattaggttttattaagttagtattaggtttttttgtttaagtaggtagggttgtgttatttttgggtttttaagtgtatattgtgggtggggttgggggtagggggtggtagtgggatttttttaatgtgtattttgtgtgtttttaggtgtttgtttttttattttttattttttaatttagttattatttttgagatggggttttttttttgttgtttaggttggagtgtaatggtattattttagtttattataatttttgttttttaggtttaagtgatttttttgttttagttttttgagtagttgggattataggtatgtattattatgtttggttaattttgtatttttggtagagatggggtttttttatgttggttaggttggttttgaatttttgattttaggtgatttgtttgttttggttttttagagtgttgggattataggtgtgagttattatgtttggttgttttttatttttattgattttttaattttattttattttttattttttgagatgaggtt

SEQ ID NO: 190 - DNA, 2196 bp, Artificial Sequence
  chemically treated genomic DNA (Homo sapiens)
tttttttttttttttttttttttattagttatattggtttatttagaattttataaattaattttgtttatttttaattttttaatattgtttttgagattgttttattagaaaagtttttttttttatttattttgtttaataatttttatttattttaatttttttgtatttattgtttttaggaatttggtatttaggatatttttgtttttatattgtttatgtatgtatattttgtttttaataaaatatttagttgtttaagggtaagggttttatagagttttaatatgttaatggtttggtgttgtttaataatttagattttgatgggttttttttagggaggggagtaaagggtaaattattttaggggttgggagtgtagaagttaaatttttgagattgtgaaaagaagatggtgttgagatgatttagtagtaggtatttaagtaagaaaaatttaaatattgtttttaataatgtttgattaatgttaaatattaagtaagggtttaggtagttttgatagtttgtagtgttttaggataaaattaattttgaggggtgttagtttatgataattttttgttagggttttggatatgttttgtttttttgaaggttaatgggttgtttttgtgtgttgaggttttgttttgtggtttgttgattggttttagttgttttggtgttaagatttaattttatattatgtgtttaggttatgtttatttgttatgtggttttggaaattgtgagtttggggattgttgtgtttattaattggatttagaagggatttttttgtttggttggtttttggtttttttgtttatttttggataaattatggggttttttgtgttgtttatggtgttttttgtttgttttgagtgttttttttttttttggtgtttttttgggttgtttttggtggttttggtgttgttgttgttttttttttttggtaggattttggggtggatttgtgtgtttgtggtgaggttagagttttgtttagttagttgggtaggaggtgtggggtgaagtttattgtatgttgtgtttgtttgggatagagagtgaggttagggttttttgaggggtgttgtgtttagattttgggggtatgtggtgggggatgtgggaattatgtagaagtttgtttggtggtattgtgtgtgtggttgatatttatgtaggatttggttgtgtttttaaaagaagtgtgaattgtgtttttgggattgagtttagttagtaaggggagggtttattgggtgttttaggtgagggtttgttttggagtgtataggtgtgtgggattgttgttagagtttgtgttgtgtttgtggtgagagtttgttttgtgtttttttggtgttttggtgagtagggtgtttattagggtttggatagtatttgtggtaagggttgtagtgtgtttgttgtgttttatgggttgggttggtttgggttgggttgggtgagtaggggtttggttaggtgttgttgggagtgtgttgtgtgtaagtggtttgtgtgtggagtttattgtgggtaagatagtttattgtttgttttgagtggagtgagtgtggattttgtggttagggagggtatgttgagtgagagtaggtttttagtgtttggggttagagaggtggtaagggtgtattatgtttttagtgttttttgtgaatagtgtttgtgttgtttgagattgtattggttttgaattttaagtggttgtttttttggggggtgggtgggttattgagttatttttttgtttttaattaatatagatagtatttgattttattgtttagtggttttttgatattgttttttttttttttattagtttgagttatatttgagagatgtgaagtaatttaaaaaatattggtagttaaatttagtgagaaattagtattttaataaaggaaggtagataatgttaattttgtttttttttatagtttataaattgaagtttaaggtttattttattgttttgtattttattgaatggaattaatatttttaaaaatgtatgttaggttaggtttagttgtttatatttgtgattttagtattttgggaggtttaagttgggtgattgtttaagtttaggagtttaagattagtttggataatatgttaaaattttatgtttataaaaaa

SEQ ID NO: 191 - DNA, 2196 bp, Artificial Sequence
  chemically treated genomic DNA (Homo sapiens)
ttttttgtagatatggggttttgatatgttgtttaggttgattttgaatttttgggtttaagtaattatttaatttgggttttttaaagtgttgggattataggtgtgagtaattgggtttggtttagtatgtatttttaaaaatattgattttatttaatgaaatataaaatagtgggataggttttaagttttagtttatgagttgtaggggaaaataagattaatattatttgtttttttttgttaggatattaattttttattaggtttggttattagtgttttttaggttgttttatattttttaaatatgatttaaattaatgaaaagaaggaaaataatgttaaaaagttattaggtaatggaattagatattgtttatattggttgggaataggaagatgatttgatggtttatttattttttaaaaaagtagttatttaaaatttaagattaatatgattttaggtaatatggatattgtttatagaaggtattaaaagtatggtgtgtttttattatttttttaattttaggtattgagagtttgtttttatttaatatgttttttttagttgtagagtttgtgtttgttttatttaaagtaaatagtgagttgttttgtttatagtgaattttgtatataggttatttgtgtatagtatgtttttagtaatatttggttaggtttttgtttgtttagtttagtttaggttagtttagtttatggggtatagtagatgtattgtaatttttattgtgggtattgtttaagttttaatgaatattttatttattaaggtattaagggaatatagggtaaatttttattatgggtatagtatgggttttagtaataattttatgtatttgtgtattttagagtaagtttttatttggggtgtttagtaagttttttttttgttgattgggtttaattttgaaaatatgatttatgttttttttgggaatgtagttagattttgtgtaaatgttggttgtgtatatgatgttattaaataagtttttgtgtggtttttgtattttttgttatatatttttgggatttgagtatggtattttttggagaattttggttttgttttttattttaagtaggtatgatgtgtagtgagttttgttttgtgttttttgtttgattgattgagtagagttttagttttgttgtggatgtgtgaatttattttggggttttattggagaaggaggatagtagtaatattagggttgttagaagtaatttaggaaagtgttgggaaggaaagggatgtttgagatggatgggaggtgttatgagtggtgtgggagattttgtgatttatttggaggtgagtagagaaattgaaagttagttgagtagggaagttttttttgagtttggttagtggatataataatttttaaatttatagtttttagggttgtatgataggtgggtgtggtttgggtgtgtagtgtgaaattgagttttagtgttggggtggttggggttaattggtgggttgtggggtggggttttggtgtgtaggggtagtttgttggtttttgaggagatagggtgtgtttagagttttggtagggggttattgtgggttagtattttttagggttagttttattttggggtattgtaggttgttaggattgtttgggtttttatttggtatttggtattagttaggtattattgggaataatatttgagttttttttgtttgaatgtttgttattgaattgttttggtgttgttttttttttatagttttaaaggtttggtttttgtatttttagtttttaagataatttgttttttgtttttttttttggagaggatttgttagaatttaaattattaagtaatattaggttgttagtatattgagattttatgggatttttgtttttgagtaattaaatgttttattgaagatgaaatatatatgtatgaataatgtaaggataagggtgttttaagtgttaaatttttggaagtaataaatgtaggaggattgggatgggtagaaattgttaggtgaagtggataagggggagaatttttttggtgaaataattttaggaataatgttggaaaattaagaatgagtaggattgatttgtagggttttgagtaagttagtatgattggtaaaagggggaaaaaaaaagggaa

SEQ ID NO: 192 - DNA, 2355 bp, Artificial Sequence
  chemically treated genomic DNA (Homo sapiens)
gtagaaaatttgggtattagtagtaagatttgggagatatttaattggaaagaaataaaaaattattagttttttgaagttatttttattttgaatgttgtttgttaagagaattatttattaaagtttttttgtagtagtttttataaaagttttattttatttagtaagaaagtgttttgttttaaatttaaataaattttatatagatgaggttttggaaattattagtttgattttttatgaagatagttagaggtggataaattaatagatttgttgaaatatttattttttgtaaataggtttgagaattaattaattagaagtggataaaaagtagggattttagaaagatgatttgatatattttattgattttttttggaatgtgatttttaattttttattaagagtttaaaatggttattagttaggatgggtttgggtgaggaattgaattataatttattttaatttttgatttggttgtttgttgttattaggagaaatggggtagagagggagggtattgtttatggagttttattttgtatgttttgatttttttttggtgtttttttattttgtttttattttgattgtttgtgagggagatgttggttgatggatttgtatttgtttttattttttgttttttttgggtgatttttttatagttttggatttttgagaaaggggaagggagatgtgtgtatatgggggtttttgggattgtggttttgtagttgttgttttggtttttagtgttggttggtgatttgaggtgtggtttgtatttatttgtagttttgttttttggtggtggtaatatttagtgatgtttttgtagtttttgtgggttggtgttagttttattgtttttgtattgtttttaagatgttaatttgttgttattatttaggggtatagggaattgaagtttggtgttgtgtgattgtggagggtggtgtgtgagtgtggttttgagtgtgtgagtgtgtgtgtgtgtgtgtggatgtgtttttttttttgatggtaaagatggtttaggaatttgatatttaagttggaatttttttgaagtgggtgaaggtgagtttgatttttttttttgtttttttattttatagtgttaaagtaattaaaagatttgtttattgaggaaaagttaaagttttgtagtttttggtagtgtttgtggttgttttttgtttttgttggatgtgtgtggtgtgtttagttttttggattgtaagaattaaggtggttttgttgtaattattgtttttattttatttttgatttgtttgtttttaaggttgattaaagatttttttttttgttttatgttgttttttttttttatatatatatatatttatatattttttgtttttttttttttgtttttttttttgttttttggggaaaggtaattggatagaatgatttatttttaggaaagtagttttggttatgtattttttgagttttttggtttttgtaggtattgggtttttaatgtggtggagttgttgggaagtttgggataggaaggaggagaggttttgagtttagttgatgttttttttttagatgtttgtgtttttttgtttaggtgtttttgtttttattgtttgtagataggtttttgttggtgtttttgtggagatttggtgttttttatttgaatttatttagtagtaatttttggttagttttagttttttaattttgttttgaagtgttgtgggtagagttttatgtagtttatttgttgtttttttaggtattgtgggttggaaggaagggaaatttgttgatgtttttttggtagtagtgttttggtattgttattattgaggaggtgtgagttttaatattgaatataagtgagtaggtgttgtttgtgttattttgttaaaggtgggaggggagaaagaaaggagtggggggagggggttgaggaaataaatttagattattggtggagaaagaagttgtttagtaagtaaagttttttttttgtgttttattttagatgttatattgttaaaagatattgatgttaattttttagaaagttgttataaagggtagagtttttgttttattttagaattttattttatttagtttggttgtttagtgagtatagagtgatttggtttttttgtatagtgtagtgagaatgtaggagaataggttttgatattttaggttgagttaagtagtaaaatggaatggtagggttgggtggtgttgttttgttttttttttttaatagttagttttgttagttttagtaattgttgttgagagtaaataatggttttgtagaaaaagaatgag

SEQ ID NO: 193 - DNA, 2355 bp, Artificial Sequence
  chemically treated genomic DNA (Homo sapiens)
tttgttttttttttgtaggattgttgtttgtttttaatggtagttgttggggttaatagaattggttgttgggagagagaggtgaggtaatgttgtttggttttgttattttattttattgtttaatttaatttggagtgttaggatttatttttttgtatttttgttgtattatatgggggagttaagttattttgtatttattggatagttaggttgggtggaatagggttttagagtggagtaggggttttgttttttatggtgattttttaaaagattagtattagtgttttttgatagtatagtatttggggtgggatgtggagaggaggttttgtttgttaaatggtttttttttttgttggtgatttggatttgtttttttggttttttttttttgtttttttttttttttttttttgtttttagtaaagtgatataggtgatatttgtttgtttgtgtttgatgttggaatttgtatttttttggtggtgatggtgttagggtattgttattagggggatattggtgggttttttttttttttagtttatgatgtttagaagggtagtgggtgggttgtgtggggttttgtttgtagtattttgaggtgggattgaggggttgaagttggttaggagttgttgttaagtggatttgagtggaaggtgttaagtttttgtgagggtattagtggggatttatttgtgagtagtgggaataggggtatttggatggaggaatgtgggtgtttggaggggggatattggttgagtttagagtttttttttttttttgttttgagttttttagtaattttgttatgttggagatttggtatttgtgagagttagggaatttgagaagtgtgtggttgaggttgtttttttgaaggtgaattattttgtttaattgtttttttttagagaataagagggagggtgggagagagggaatggaggatgtgtgagtgtgtgtgtgtgtgagagggagagatgatgtgaggtgagaggaaaagtttttagttggttttaaaagtaaataaattagagatggaataagagtggtaattgtagtaagattgttttgatttttgtagtttagggagttgagtgtattgtgtgtatttggtgaggataggaggtgattgtgggtgttgttaagggttgtgggattttggtttttttttagtaaataaattttttgattattttgatattgtggaataaagaagtggggagaaggattaggtttatttttatttgttttagggggattttagtttggatgttagatttttgaattgtttttgttattggaggaggaaatatatttatatatgtgtgtgtatatttgtatgtttagggttatatttatatgttgttttttatgattatatagtattagattttggttttttatgtttttggatggtgatggtggattggtattttggaagtgatgtgagagtgataaggttggtgttggtttgtaaaagttgtaggagtattgttaggtgttgttgttattgggaagtggggttgtaggtaggtgtgagttgtgttttgggttgttggttagtgttggggattggagtggtaattgtaggattgtggttttggaagtttttgtgtgtatatgttttttttttttttttttgggggtttgggattgtagagggattgtttggggaaggtgagaggtgagggtagatgtgggtttattggttggtgttttttttgtgggtggttagggtaggggtggagtagagggatgttgagaggggattggagtatgtgaaatgaggttttgtgagtggtgttttttttttttgttttattttttttaataatagtaaatgattaggttgaggattgaagtgggttgtaatttgattttttatttagatttattttggttggtaattattttggatttttaataaggagttgggggttgtattttagggaagattaatgggatgtgttaggttatttttttgaaatttttattttttgtttatttttgattagttaatttttaggtttgtttgtagaaggtgggtgttttagtgagtttattgatttatttatttttaattatttttataaagaattaagttgataatttttggagttttatttatgtaaggtttatttagatttgggatggggtgtttttttattgaatgaaataaagtttttgtaaaggttattataagagagttttagtaaatgatttttttaatgaatagtgtttagaataagaatggttttgggaaattaatggttttttatttttttttggttagatgttttttggattttgttattagtatttgggttttttgt

SEQ ID NO: 194 - DNA, 3404 bp, Artificial Sequence
  chemically treated genomic DNA (Homo sapiens)
ggtttgagaatgtttaattggaagttgtttttaagtgatttgtgtgttttttttttgtttggtttgttttttggttaaatttttaaaagagtgtgtatttttttttgtttggagtagagtgttgatttttttttgtgtttgtggaggtgtagttttttggtttatttggatgttgggggttaggtttaggattttagggttttgtgttttggagttttgtgggttaataggtgatgggagaggggttagattgggggtgtgttttgatagatttaggtaatgattgtgtgggtaaaggttggtgttttggggttggggtggggttgttggaggggtggggtgggggttgttagatgggtgtgttagttgtgttaagtatttattatgtttttgttagatttgggtattttagggagttggtggtgtttttgtttgagaaggagttgggaagaggagagtggtttttgggaagaggagagtggtttttgggaagtattttttttgaggaagaggtggtggtggtggtggtatttatggagagaaaaagtaagtagttgtattttgtttttaagtgttagattttgatatgtgttttttgtagtgatgataattgattaatttgagagaatgtgtataaggaaagtgagggaagggggttttttatttttttttagttatttttaaatgttttaggaggtttggtatttgttttaagtggtttttagtgttagtttttgggtattgtgggttgttttggggtttgtgaatttttagaatgttagtttttggttgttgttgtgttttagaggtgttgttgtttagaagttgggtgtatttgttgtttgttagttatagattattatttttttttttattatttttgtgttttttatatattatatttttgtatttaaagaatttaggtttttagaattagaattttttttatgtagtttgtatttagaagagtaaagagaattagatattttggttgtaggaatttttttttttagtgatgtagttatttatagtttaaattttagtttgagtttgtgtgtgtttgtgtgtggggttttgttgtggtggtgtaaattttttttttggtttgttattttagaggaattatagtatgttagggttgaaggtttttgattgttaatgttaggggagtagaaatgtggttttggaggggatgagtgtgtgtttttagtagatgtttgtttttttgtaaatgtgtaattgttagtttggaggtatggggttttttgaatgggtttagtatttatataggttgtagatgtggaaagtggggttagaaggttaggttgaaagaaggattagaatttggtgttgggtttgaggggggtttgagtgaattaagaggagtgtatgatgagaataaagaaaaggtgtattaagtttttagaaatagatgaattaaggatttatatgtaagtttttttaatattttgtttgataattattatgatttaaattttataatagatttttttttttttatatattaggaataagtaattattttttttttgtttttaatagattgaaaaatgaaatttagatatatagtttgaaagattaggggggtgatgggatgaggggggttggggatgggattgtgatattgtttaaaagtaagagatttttattgatagggtttatttttttttagttttaattataggtattgaaaggtattttattttttgttaaaggtttaaagaaggaaaatataattatatataggtgtatttgtaatagtttgttaaataaaatttgtttttttttattagaattaatttttagggtttaggtttttggtaaggattgggtatttggattttttaattgttgtattatggggtaaataattggggattttgagttgtttaggtggtatttttataaattgtatagttttagtttgttttttgtttttatggtttgattaagtttgttgggttgttgttgtttttatgattgttgggtttgatgtgtagtgtgtgttgaatggagatatttttggtttttgggttgtgtgttgtatgttgtgttttatttttgtggtgttattgttttgtgttggtggttgagtgttaattgtaggattgtgttgttgtttttgatgtagtgagtattttattagtaatttgagttttttgagtttattgaagttttggtttttttgggaaggttttgggtttttgttatttgttggtgggttggtggagatggtaggggttgtattttttagtttttaatttaattttggttgtagtttttatagaaggtgaataaggagataaggaagattgagttagagagagatgtgatttgtttgaggtattaagaaataagtttgttggtagtttttttaattttattttatttttgttgttgtttatgttttttagattgtttgtgttagaaattttgtatttgttggatggatggttttgggtatagggttgtaggtggtttggaatagttttggtttgtgtttgttggtttgttaggagtggttttagtggtgagggggtggggagttggtgggggagggttgtttggtgttggaggtgtggttggtagtgttgtggatgagttggtttgtgtaggtagatatttaaataaataagttagaataaattttgtttttttattattttatttttttttgtagtttgtgttttttttgtgtgtgtaaagtggagtagttagatgtagtataaaataatttatgaagggtattgagtttgaaaaattatggtgtatgagtaggttttattttaggttttagttattttgagttgtggatttttaaatgttgtttgttttgaagtagtttttgttttattgtgttttttgtattgatttttttttttggtttttgattggttgttttatgtttagttttttttaattttttttttatttttgtttgtttgtattgtgtttgttgtttgtaagtttttgattgtagattggttgtttgttttatattttaataatattaattagggggggagggggtggggttttgagttgagagtttttgttatttgggttgagtggtaggtatagttggtttgttaggaggtgatttttagggttaaggggtgggttttggtgaaatggttgttttggttatgggggtggggtttgaggtaggagttaattggtgttgagtggagttaggttgttggtttaggattttttttaggttttgagtttgtgttggatgtttagaggagaatgaggatggtagttgaggtgtgtgttgttttggatgttttgtttttagtaattgtagtttttgtgtagtagaataaatttgagaataatgtttttaatttatatttttttttatagttgtattttgtgtg

SEQ ID NO: 195 - DNA, 3404 bp, Artificial Sequence
  chemically treated genomic DNA (Homo sapiens)
tgtgtggagtatagttatagaaaagagtgtaagttgggagtgttatttttggatttattttgttatgtgaaagttgtggttgttaaaagtagagtgtttaaagtagtatatattttggttattatttttgtttttttttgaatatttagtgtgagtttagaatttggagggaattttggattagtaatttgattttgtttggtattgattggtttttgttttggattttgtttttgtggttggggtggttattttgttgggatttgttttttggttttgggaattgttttttggtaggttggttgtgtttgttatttagtttgagtggtggaggtttttagtttggagttttgttttttttttttttaattgatattattggagtgtggagtaagtggttggtttgtagttggagatttgtaggtagtaaatatggtgtgagtgaataggagtgggggggaaattaaaaaaagttaaatgtggagtagttgattggggattgagaaggggaattgatgtaaggagtataataaaataaaagttattttggaataaatagtatttaaaaatttatgatttaagataattgaaatttaaaataaaatttgtttatgtattatggttttttaaatttggtattttttatggattattttatgttatatttggttgttttgttttgtatatataggggaggtgtaggttgtgaaggaaggtaaggtgatgggaaagtaaagtttgttttgatttatttatttagatgtttatttgtataagttagtttgtttgtggtgttgttggttgtgtttttggtgttgggtgatttttttttgttggttttttgtttttttattgttgaggttgtttttggtggattagtgagtgtgaattagggttgttttgagttgtttatagttttgtgtttggagttgtttatttgatgggtgtgggatttttggtgtgggtagtttggagggtgtgagtagtaatgggggtggggtggggttggaggaattgttggtgagtttattttttagtattttaggtgggttatatttttttttagtttggttttttttgtttttttatttgttttttgtgggagttgtggttagagttgggttggagattgggaaatgtagtttttattgtttttgttagtttgttggtgagtggtgggagtttggagtttttttagagggattgagattttgatgagtttggaaagtttgggttattaatgaagtgtttattgtgttggaggtggtggtgtggttttgtggttggtgtttggttgttagtatggaataataatgttgtggaggtgaagtgtggtgtgtggtgtgtgatttgagggttggggatgtttttatttagtgtgtgttgtgtgttgggtttagtggttatgggggtagtggtagtttagtgggtttggttgggttgtggaggtagggggtgggttggagttgtgtaatttgtaaggatgttgtttgggtgatttaaagtttttaattatttgttttatagtgtagtaattgaggaatttgagtgtttaatttttgttaaagatttgaattttgagggttggttttggtaggagaaggtaggttttatttggtaagttgttatagatatgtttgtatatggttatgttttttttttttgaatttttgatagaaggtaaaatattttttggtgtttgtagttggagttggggaaaaataaattttgttaatggaagttttttgtttttgagtagtgttataattttatttttaattttttttattttgttgtttttttggttttttaggttgtgtatttaagttttattttttgatttgttaaaagtagaagagaaataattatttatttttgatgtgtagagggagaggaatttgttatgaaatttaggttatggtggttattgggtggggtgttgaggggatttatatataggtttttgatttatttatttttgaaaatttagtgtattttttttttatttttattgtgtattttttttagtttgtttaagttttttttaaatttggtgttaaattttagttttttttttagtttgattttttgattttattttttatatttgtaatttgtatagatgttgaatttatttagagaattttgtgtttttaagttggtggttatgtgtttgtagaaggatggatatttgttagaaatgtatgtttattttttttaaaattatatttttatttttttgatgttagtgattagaaatttttagttttggtatattgtgatttttttggaatagtggattagaggaaaagtttgtattgttgtggtgaaattttgtgtgtgaatatatgtagatttgggttggagtttgggttataaataattgtattattagggggagaggtttttgtagttagaatgtttagttttttttgtttttttgggtgtaagttatgtgaagaggattttgattttaagagtttgaattttttagatgtagaagtgtgatgtataaaaggtgtgggggtgatgggagggagggtggtgatttgtggttggtgggtggtgagtgtgtttggtttttaggtggtgatgtttttagggtgtagtggtgattaagagttggtgttttaggagtttataagttttgaggtggtttgtagtatttaagggttagtgttgggaattgtttgaagtaggtgttgggttttttggggtatttgggggtggttagaggaagataagaaattttttttttttattttttttgtgtatgtttttttgggttggttagttattattgttatagggagtgtgtgttagagtttgatgtttgaaggtaaagtgtagttgtttattttttttttttgtaaatgttgttgttgttgttgttttttttttagaggagatgttttttgaaagttatttttttttttttgaaagttatttttttttttttgatttttttttgagtgagggtgttattggttttttggagtgtttaggtttggtagaggtgtaatggatgtttggtgtggttggtgtgtttgtttggtagtttttgttttgtttttttgatggttttgttttagttttgggatgttagtttttgtttgtgtggttgttgtttgggtttgttagggtgtgtttttagtttagttttttttttattatttgttggtttataggattttggggtgtggagttttggagttttaggtttggtttttagtgtttgggtgagttgagggattgtgtttttgtgggtgtaaagggaggttggtattttgttttgagtgggaagggatatgtgtttttttgagggtttaattagagagtggattgagtagaagagagatgtatggattatttgagagtggtttttgattaaatgtttttgggtt

SEQ ID NO: 196 - DNA, 10 bp, Homo Sapiens
gggccgcggc

SEQ ID NO: 197 - DNA, 10 bp, Homo Sapiens
ccccgcgggg

SEQ ID NO: 198 - DNA, 10 bp, Homo Sapiens
cgcgggggcg

SEQ ID NO: 199 - DNA, 10 bp, Homo Sapiens
gcgcgccgcg

SEQ ID NO: 200 - DNA, 10 bp, Homo Sapiens
gcggggcggc

SEQ ID NO: 201 - DNA, 10 bp, Homo Sapiens
gcgccgacgt

SEQ ID NO: 202 - DNA, 10 bp, Homo Sapiens
cgggacgcga

SEQ ID NO: 203 - DNA, 10 bp, Homo Sapiens
ccgcgatcgc

SEQ ID NO: 204 - DNA, 10 bp, Homo Sapiens
tggccgccga

SEQ ID NO: 205 - DNA, 10 bp, Homo Sapiens
tgcgacgccg

SEQ ID NO: 206 - DNA, 10 bp, Homo Sapiens
atcccgcccg

SEQ ID NO: 207 - DNA, 10 bp, Homo Sapiens
gcgcatgcgg

SEQ ID NO: 208 - DNA, 10 bp, Homo Sapiens
gcgacgtgcg

SEQ ID NO: 209 - DNA, 10 bp, Homo Sapiens
  unsure (7, 9): unknown base
gccgcgngng

SEQ ID NO: 210 - DNA, 10 bp, Homo Sapiens
  unsure (8, 9): unknown base
gcccgcgnng

SEQ ID NO: 211 - DNA, 10 bp, Homo Sapiens
agcggccgcg

SEQ ID NO: 212 - DNA, 10 bp, Homo Sapiens
ctcccacgcg

SEQ ID NO: 213 - DNA, 10 bp, Homo Sapiens
gaggtgcgcg

SEQ ID NO: 214 - DNA, 10 bp, Homo Sapiens
aggggacgcg

SEQ ID NO: 215 - DNA, 10 bp, Homo Sapiens
gagaggcgcg

SEQ ID NO: 216 - DNA, 10 bp, Homo Sapiens
gcccccgcga

SEQ ID NO: 217 - DNA, 10 bp, Homo Sapiens
cggggcgcga

SEQ ID NO: 218 - DNA, 10 bp, Homo Sapiens
ggggacgcga

SEQ ID NO: 219 - DNA, 10 bp, Homo Sapiens
accccacccg

SEQ ID NO: 220 - DNA, 24 bp, Homo Sapiens
agcactctccagcctctcaccgac

SEQ ID NO: 221 - DNA, 12 bp, Homo Sapiens
ccgggtcggtga

SEQ ID NO: 222 - DNA, 24 bp, Homo Sapiens
accgacgtcgactatccatgaacc

SEQ ID NO: 223 - DNA, 12 bp, Homo Sapiens
ccggggttcatg

SEQ ID NO: 224 - DNA, 24 bp, Homo Sapiens
aggcaactgtgctatccgagtgac

SEQ ID NO: 225 - DNA, 12 bp, Homo Sapiens
ccgggtcactcg

1. A method for detecting, or detecting and distinguishing between or among colorectal cell proliferative disorders, comprising contacting genomic DNA of a biological sample obtained from the subject with at least one reagent, or series of reagents that distinguishes between methylated and non-methylated CpG dinucleotides within a target sequence of the genomic DNA, wherein the target sequence comprises a sequence of at least 18 contiguous nucleotides of a sequence selected from the group consisting of SEQ ID NOS:1-39.

2. The method of claim 1, wherein said colorectal cell proliferative disorders are selected from the group consisting of colorectal carcinoma, colon adenomas, and colon polyps.

3. The method of claim 1, wherein the biological sample obtained from the subject is selected from the group consisting of histological slides, biopsies, paraffin-embedded tissue, bodily fluids, stool, blood, serum, plasma and combinations thereof.

4. The method of to claim 1, comprising:
a) obtaining a biological sample containing genomic DNA;
b) extracting, or otherwise isolating the genomic DNA;
c) digesting the genomic DNA of b) comprising at least one CpG dinucleotide of a sequence selected from the group consisting of SEQ ID NOS:1-39, with one or more methylation sensitive restriction enzymes;
d) detecting the DNA fragments generated in the digest of c); and
e) determining, based at least in part on the presence or absence of, or on a property of said fragments, the methylation state of at least one CpG dinucleotide sequence of SEQ ID NO:1 to SEQ ID NO:39, or an average, or a value reflecting an average methylation state of a plurality of CpG dinucleotide sequences of SEQ ID NOS:1 to SEQ ID NO:39 , whereby at least one of detecting, or detecting and distinguishing between or among colorectal cell proliferative disorders is, at least in part, enabled.

5. The method of to claim 4, wherein the DNA digest is amplified prior to d).

6. The method of to claim 1, comprising:
a) obtaining, from a subject, a biological sample having subject genomic DNA;
b) treating the genomic DNA, or a fragment thereof, with one or more reagents to convert 5-position unmethylated cytosine bases to uracil or to another base that is detectably dissimilar to cytosine in terms of hybridization properties;
c) contacting the treated genomic DNA, or the treated fragment thereof, with an amplification enzyme and at least two primers comprising, in each case, a contiguous sequence at least 18 nucleotides in length that is complementary to, or hybridizes under moderately stringent or stringent conditions to a sequence selected from the group consisting of SEQ ID NOS:40-195, and complements thereof, wherein the treated DNA or a fragment thereof is either amplified to produce one or more amplificates, or is not amplified; and
d) determining, based on the presence or absence of, or on a property of said amplificate, the methylation state of at least one CpG dinucleotide of a sequence selected from the group consisting of SEQ ID NOS: 1-39, or an average, or a value reflecting an average methylation state of a plurality of said CpG dinucleotide sequences, whereby at least one of detecting, or detecting and distinguishing between or among colorectal cell proliferative disorders is, at least in part, enabled.

7. The method of claim 6, wherein in b) treating the genomic DNA, or the fragment thereof, comprises use of a solution selected from the group consisting of bisulfite, hydrogen sulfite, disulfite, and combinations thereof.

8. The method of claim 6, wherein treating in b) comprises at least one of treatment subsequent to embedding the DNA in agarose, treating in the presence of a DNA denaturing reagent, or treating in the presence of a radical trap reagent.

9. The method of claim 5, wherein contacting or amplifying comprises use of at least one method selected from the group consisting of: use of a heat-resistant DNA polymerase as the amplification enzyme; use of a polymerase chain reaction (PCR); generation of a amplificate nucleic acid molecule carrying a detectable labels; and combinations thereof.

10. The method of claim 9, wherein the detectable amplificate label is selected from the label group consisting of: fluorescent labels; radionuclides or radiolabels; amplificate mass labels detectable in a mass spectrometer; detachable amplificate fragment mass labels detectable in a mass spectrometer; amplificate, and detachable amplificate fragment mass labels having a single-positive or single-negative net charge detectable in a mass spectrometer; and combinations thereof.

11. A nucleic acid comprising a sequence of at least 18 contiguous nucleotides of a treated genomic DNA sequence selected from the group consisting of SEQ ID NOS:40-195, and sequences complementary thereto, wherein the contiguous sequence comprises at least one CpG, TpA, or CpA dinucleotide, and wherein the treatment is suitable to convert at least one unmethylated cytosine base of the genomic DNA sequence initially to uracil or another base that is detectably dissimilar to cytosine in terms of hybridization.

12. An oligomer or peptide nucleic acid (PNA)-oligomer, said oligomer comprising in each case a sequence of at least 9 contiguous nucleotides that is complementary to, or hybridizes under moderately stringent or stringent conditions to a treated genomic DNA sequence selected from the group consisting of SEQ ID NOS:40-195, and sequences complementary thereto.

13. The oligomer of claim 12, wherein the contiguous sequence includes at least one CpG, TpG or CpA dinucleotide.

14. The oligomer of claim 13, wherein the cytosine of the CpG, the thymine of the TpG, or the adenosine of the CpA dinucleotide is located at about the middle third of the oligomer.

15. A set of oligomers, comprising at least two oligomers according, in each case, to any one of claims 12 to 14.

16. The set of oligomers of claim 15, comprising one or more oligomers suitable for use as primer oligonucleotides for the amplification of a DNA sequence selected from the group consisting of SEQ ID NOS:40-195, and sequences complementary thereto.

17. The set of oligomers of claim 15, wherein at least one oligomer is bound to a solid phase.

18. A use of the set of oligomers according to any one of claims 15 through 17, wherein at least one oligomer can be used as a probe for detecting at least one of the cytosine methylation state, or single nucleotide polymorphisms (SNPs) within a sequence selected from the group consisting of SEQ ID NOS:1-39, and sequences complementary thereto.

19. An oligomer array, according to claim 17.

20. The array of claim 19, wherein the oligomers or peptide nucleic acid (PNA)-oligomers are arranged on a planar solid phase in the form of a rectangular or hexagonal lattice, or in a form substantially so.

21. The array of claim 19, wherein the solid phase comprises a material selected from the group consisting of silicon, glass, polystyrene, aluminium, steel, iron, copper, nickel, silver, gold, and combinations thereof.

22. A kit for detecting, or for detecting and distinguishing between or among colorectal cell proliferative disorders, comprising:
a) at lease one of a bisulfite reagent or a methylation-sensitive restriction enzyme;
b) at least one nucleic acid molecule or peptide nucleic acid molecule comprising, in each case, a contiguous sequence of at least 9 nucleotides that is complementary to, or hybridizes under moderately stringent or stringent conditions to a sequence selected from the group consisting of SEQ ID NOS:1-1 95, and complements thereof.

23. A use of a nucleic acid according to any one of claims 11 or 25, of an oligomer or PNA-oligomer according to any one of claims 12 through 14, of a kit according to claim 22, of an array according to any one of claims 19 through 21, of a set of oligonucleotides according to any one of claims 15 through 17, or of a method according to any one of claims 1 through 10, for classifying, distinguishing between or among, diagnosing or determining the predisposition for colorectal cell proliferative disorders.

24. A use of a nucleic acid according to any one of claims 11 or 25, of an oligomer or PNA-oligomer according to any one of the claims 15 through 17, of a kit according to claim 22, of an array according to any one of the claims 19 through 21, of a set of oligonucleotides according to one of claims 15 through 17, or of a method according to any one of claims 1 through 10, for the therapy of colorectal cell proliferative disorders.

25. An isolated treated nucleic acid derived from a genomic DNA sequence selected from the group consisting of SEQ ID NOS:1-39, and sequences complementary thereto, wherein the treatment is suitable to convert at least one unmethylated cytosine base of the genomic DNA sequence to uracil or to another base that is detectably dissimilar to cytosine in terms of hybridization.
